United States Patent Application Publication US 2020/0329713 A1 - sequence listing, part 14

SEQ ID NO: 4 - DNA, 6648615 bp, Bacillus thuringiensis (residues 4,986,463-6,648,615 of 6,648,615)
attaatggaaaaagagttagatgtacttggtaaagcactttctaacccagaacgtccatttacagctatcatcggtggtgcgaaagtaaaagataaaatcggtgtaattcgtcatctattagacaaagtagataacttaatcatcggtggtggacttgcttacacattcgttaaagctttaggtcatgaaattggtctatctctatgtgaagacgacaagatcgaactagctaaagaatttatgcaacttgcaaaagaaaaaggcgtaaacttctacatgccagttgatgttgtaatcactgaggaattctctgaaactgcaacaactaaaatcgttggtatcgactctatcccttctaactgggaaggcgtggacatcggtcctaaaacacgtgaaatttatgcagatgtaattaaaaattctaagcttgttgtatggaatggaccaatgggtgtattcgaaatgactccattcgcagaaggtacaaaagcagtaggacaagcattagcagatgcagaagatacatactctgttatcggcggtggtgactctgcagcagctgttgaaaaattcggtatggctgataaaatgagccacatttctactggcggcggtgcgtcattagaattcatggaaggtaaagagcttccaggtgtagtttgtcttaacgacaaataagtagcagccaaagaaaaaggacggtgcaaagcatgcgtaaaccaattatcgcaggtaactggaaaatgaataaaactctatctgaagcagttagcttcgtagaggaagttaaaggtcaaatcccagcagcttcagctgttgatgcagtagtttgctctccagctctattcttagagcgccttgtagcagcaactgaaggaactgacttacaagtaggtgcacaaaacatgcacttcgaaaaaaatggtgcattcactggcgaaattagcccagtagcacttagcgacttaaaagttggctatgtagtacttggccactctgagcgtcgtgaaatgtttgctgaaacagatgagtcagtaaacaaaaagactatcgcagcatttgaacatggtttaacaccaatcgtatgttgtggtgagactttagaagagcgcgaaagcggaaaaacatttgatctagtagcaggtcaagtgacaaaagcacttgcaggtttaacagaagagcaagttaaagcaactgttatcgcttatgagccaatctgggctatcggtacaggtaaatcttcttcttctgcagatgcaaacgaagtatgtgcgcacatccgtaaagttgttgcagaagctgtttctccagaagctgcagaagctgttcgtatccaatacggcggtagcgtaaaaccagaaaacattaaagagtatatggcacaatctgacatcgacggcgctttagttggcggtgctagcttagagcctgcttcgttcttaggtcttctgggggcggtaaaatgagaaagccaacagctttaatcattcttgacggtttcggacttcgtgaagaaacttacgggaatgctgtagcacaagctaagaaacctaattttgatggttactggaacaaattccctcacacaacgcttacagcttgtggcgaggcagtaggtcttccagaaggtcaaatgggtaactctgaggttggtcacttaaatatcggtgctggccgcgtagtatatcaaagcttaacacgcgttaacgttgcaattcgtgaaggcgagttcgataagaacgaaacttttcaaaatgcaattaaaagtgtaaaagaaaaaggtactgcacttcatttattcggtttactttctgacggtggtgtgcacagtcacatgaaccatatgtttgctcttcttcgcttagcagcaaaagaaggcgtggagaaagtttatatccatgcattcttagacggccgcgatgttggaccacaaacagcaaaaggttatatcgatgcaacgaatgaagtaattaaagaaacaggagtaggacaattcgcgactatctctggtcgttattactctatggaccgtgacaagcgttgggatcgcgtagaaaaatgttacagtgctatggtgaatggtgaaggccctacttataaatcagcagaagagtgtgtagaagactcttatgcgaacggtatctatgatgaattcgtattgccgtctgtaattgttaacgaagataacacgccagttgcaacaatcaatgatgatgatgcagttatcttctataacttccgtccagaccgtgcaattcaaattgctcgtgtatttacaaacgaagacttccgtgagttcgatcgtggtgaaaaagtacctcacattccagaattcgtatgtatgacacacttcagtgaaactgtagatggttacgtggcattcaagccaatgaaccttgataacactttaggtgaagttgttgcgcaagcgggattaaagcaacttcgcatcgcggaaactgaaaagtatccgcacgttacattcttctttagcggtggtcgtgaggctgaattcccaggagaagagcgtatcttaattaactcaccgaaggttgcaacgtatgacttgaaacctgaaatgagcatttacgaagtaacggacgctttagtaaatgaaatcgaaaatgataaacatgatgttatcattcttaactttgcgaactgtgatatggttggccattctgggatgatggaaccaacaattaaagcagtagaagcaactgacgaatgtttaggaaaagttgtagaagcgattcttgcaaaagatggtgtagcacttattactgctgaccatggtaatgctgatcaggagttaactgctgatggcggtcctatgacagctcatacaactaacccggttcctttcatcgttacaaaaaatgatgtagagcttcgtgaaggtggtattttaggagatatcgctccaacaatgcttacacttttaaatgtggaacaaccgaaagaaatgacaggtaaaacaattattaaataatttgcttatataaaaaggagagaatttattatgtcaacaattattgatgtttatgctcgcgaagtccttgactctcgtggtaacccaactgtagaagtagaagtttacacagaaagcggcgctttcggacgcgctatcgtaccaagtggtgcatctactggtgagcacgaagcagtagaattacgtgacggtgacaaatctcgttaccttggtaaaggtgttgttaacgcagtaaacaacgttaacgaaattatcgctccagaaatcgctggtttcgatgtaactgaccaagctggtatcgaccgtgctatgatcgaattagatggcactccaaacaaaggtaaactaggcgctaacgctatccttggtgtatctatggcagtagctcacgcagcagctgacttcgtaggtcttccattataccgttaccttggtggattcaatgcaaaacaattaccaactccaatgatgaacatcatcaacggtggttctcacgctgataacaacgttgacttccaagagttcatgatcttaccagttggtgctccaacattcaaagaatcaatccgtatgggtgctgaagtattccatgcacttaaagctgtattacatgacaaaggtcttaacactgcagtaggtgacgaaggtggattcgctccaaaccttggttctaaccgtgaagctttagaagtaatcatcgaagctatcgaaaaagctggttacaaagctggcgagaacgtattcttaggaatggacgttgcttcttctgagttctacaacaaagaaactggtaaatatgaccttgcaggcgaaggccgtactggcttaacttctgcagaaatggttgatttctatgaagagctttgcaaagacttcccaatcatctctatcgaagatggtttagacgaaaacgactgggatggtcacaaattattaactgagcgtatcggtgataaagtacaattagttggtgacgatttattcgtaactaacactcaaaaacttgctgaaggtatcgaaaaaggtatctctaactcaatcttaattaaagttaaccaaatcggtactttaactgagactttcgaagctatcgaaatggctaaacgtgctggttacacagcagttgtatctcaccgttctggtgaaactgaagatgctacaatcgctgacatcgcagttgcaactaacgctggccaaatcaaaactggttctatgagccgtactgaccgtattgctaagtacaaccaattattacgcatcgaagacgaactaggcgaaatcgctgtttacgatggtatcaaatctttctataacatcaaacgataattgtaggaaataaacgacagaccgtgagaaatcacggtctgtttttttatgctaaaattgttcacccgtcataagtgacatgaaatgtttgaagaagcggttatagtcaaaatcaattgcgatttgatgaaccggccaatcaataaatggcttctggttcactagagaacgaaattcccctatgcttgctccttgtgcagaggattctgtcatgacaacaataggtgatttatgatacgtgaacatagagttatcaaataaagcgagtattggcattgtgtcatggaaggggctcccctttaaatgtggtagggcgtctttataatatccgtagtaataatgatcaaataacggtttgacaagtggagcttttccttttgcctcaatgtattctgccatttctggtgtaatgatggagtattgagtgacgtttaatgggtatatgtacatgttaactgcggattgaaggactatattagcagcagtaggatcgccataaaagtttgcttcggaaataggggtaacattaccaggatgtaaaaaggcaccgcccattacgtagtaagatttaatttgtttcattaactgtttgcacatgataaacaaaattgctagggaggtaagtcttcctaaactcacaatgattaattcatctttatactgttcaataagaggaatgacttcaaaaaaattctccatttctccgttagtcacattcacctttggaataattggaccgagcccctgtttcccatgtacatccgtaaaaaacgcaggtgaggcaccagtaaggggacgttctgaaccaccgaatatcttgatatttctattctttgtttcgttattaaaaaaatgagcattttctacggccgttttttttggaacattgccgtaatcagcaacgataccgacgatttctatttcatcgataaagaatgctaagaggagagccatcgtatcatcaatcccaggatcacaaaaaatgagaacttttttgggcatatgttcaccacctatcttgtttatccggtacaaatccgcttggtgagggctaataattaatggggatgaggaaaacctcaatgattaaagtttcactttatatatatgtaagtttaaggataaaaagattattttattgaaataatagtcttttaaattcagaaaataaaaactttttatattaggtcaaggtttttgacgtaattttcgtttagaaatgcagtcatatcaaggttgtaagcgtataacataggctgtttttgctgtcaagttgataaattgcagctttttacaatttatactatgataaagatattaacagaagatcgtataaacatgagggatgatgaacatgaaatttacaaagattcttgtccaaattgctgctctttacgtgttttatatggttggaacttgggtgcaagaaatgttaaatattccgattccaggaagtttgattggaatgttcctcttacttgttttacttagcctaaaagttcttccagtgaaatggttcgatttaggagcagaaacactcgttgctattatgccgtttttattaattccgccaacgcttggcctaatgaattacggtgctttttttatgagtaaaggaatttctcttttcattacagttgtagcgagtacatttttaattattattgtcgcaggacatacaggacaatatcttgcgaataggaaggaaagagagtcgcgatgagccaaatattaatcggaatcggttgggttctttttacggtgctattatatcaattatctaaaaaaatctataaattatttccaacaccattcaccattccaatgcttgtagcaactggattaatggctttcctatttatcgtgcttgatataccatatcaacattatatggaaagtggtggtggctggattgcaaagctacttggacccggtgttgtagcatttgcaattcctctttataaacaacgtcatgttctgcaaaaatatgttgtaccgattgctggcggggtattagtaggtacaacagttgcaatcgctagtgattttgcgattgcttcacttatgggaacggataaaagcttaatcttatcgtcattaccaaaatcggtgacaatgccagttgcgatgagtgtttctgagcaagtcggtggtgtaccttccttaacagcagctttcgttgttatcgcaggtattactggaacgattacaggacctcttttattaaaatggagccgtgttacaaactcagttggtaaaggtatcggatttggatgtgcttctcatattatgggtgttatgagagcgatgaaaaataacgaacatgaaggtgttattggatcggtaacaatgacattaacagcaattttgacatgtttacttggaccgttatttgcgatgatgtttatgtaatagaagaaaagcgagagcgcctctatagctctcgcttttctatagaatttatgctacagttacaataactgaatctttgtaggaggtacgccaagtgcatacgttattatcagttttacttattattgtatcgattttaatgattgttatggtacttatgcaatctagtaatagctcaggcctttcaggtgcaatttcaggcggtgcggagcaattatttggtaagcaaaaggcacgtggaattgaagcggtattaaaccgtattacaattgttttagctgtattgttctttgtattaacaattggtgttacgtacttcaatttatagaattgaaagaagaagcgttagtgaatggtactaatggttcttctttttttgttttgctatttgaaagatgtttctaattagattatagaaatacaaatatggtacactagatatagaaagaatacgactagattacagaagagaaagaggagaaatacatgatgaaattagcatctccgaaaccatttacatttgagggtggagaccgcgctgttttattactacatggattcacagggaactcagctgatgtacgtatgttagggcgtttcttagaaaagaaaggctatacttgtcatgcgccaatttataaagggcacggtgtaccaccagaagagcttgttcatacagggcctgaagattggtggcaagatgtaacggaggcatatcagcttttaaaagataaaggttttgagaaaattgctgttgttggattgtcacttggcggcgtattttctttaaaattaggttatacagtaccggttttaggtgtagtaccaatgtgtgcaccgatgtatattaagagcgaagaaacgatgtaccaaggtatattggcatatgcccgcgaatataaaaaacgtgagcaaaaatcacctgaacaaattgaacaagaaatgttggaattccaaaagacaccgatgaatacattaaaagcattacaacaattaattgctgacgtacgtaacaatgtggatatgatttatgcgccaacatttgttgtacaagcacgtcatgacgaaatgattaatacagatagtgctaacattatttataacggtgtagaatctacgttaaaagacattaaatggtatgaagactctacgcatgtcattacacttgataaacaacgtgacgagctacatgaggatgtatataacttcttggagcaactagattggtaagatctagttgcctctttttttcataaggaattttttgtgaaaactgtaaaaatcataaggggagtattgaagtttcactttatacatcccctatctttcggatacactaaataatataaggttttaaaggaggtatttttgcttggaagaaatcatacaagaacatattgataagttgttattatttatgagagaagaagcgtataaaccgctaacgatacaagagttagaagaggcatttgggattgaaggttctgagggctttaaagatttcgtaaaggcacttgtaacgatggaagaaaagggacttgttattcgtactcgtagcaaccgttacggtcttcctgaaaagatgaatttagtaagaggtaagttaattggacatgcacgtggttttgcattcgttgtaccagacgagaagaaaacgggagacgatgatcttttcatcccgcctacagaattaaacggtgcacttcatggcgatacagtattagcacgccttagttctcaatcgagcggttcgcgtcaagaaggttcaattgtacgcattttagagcgtggaacgaaagaactagttggtacatatacagaatcgaaaaactttggattcgttatacctgacaataagcgctggacgagtgatatctttatcttgaaaagcgcatcgatgggtgctgtagaaggtcataaagtagttgtgaaaattacgagctatccagagaatcgtttaagtgcagaaggtgaagttattcaaattctaggtcataaaaatgatccaggagtagatattttatctgtcattcataaacatcatttacctttagcattccctgaggaagtgatggagcatgcaaacagtgtaccagaaacgatttcagaagaagatttaaaagatcgccgcgacctgcgcgatcaaatgatcgtaacgattgatggtgcagatgcgaaagacttagatgatgctgttacagtaacgaagcttgagaacggtaactacaagctaggcgttcacattgcggatgtaagtcattacgttcaagaaggctctccaattgatgttgaagcagcggaaagagcgacgagtgtatatcttgttgaccgtgtaatcccgatgattccgcatcgtctatctaacggtatttgttcattaaatccgaaagtagaccgtctgacgttatcttgtgaaatggaaatcaacaacttaggtgatgttgttaaacacgagattttccaaagtgtgattaaaacgacagagcgtatgacgtatgctgacgtaagaagcattttagaagatgaggacgaagagttaattaagcgttatgagccgctcgtaccgatgtttaaagagatgggtcaattggcacaaattttacgtgaaaaacgtatgcgccgtggtgcaattgactttgactttaaagaagcgaaagtattagtggatgaagaaggaaaaccgactgatgttgttatgcgtgatcgttctgtttcagagaagttaattgaagaatttatgcttgttgcgaatgaaacagtagcagagcacttccactggatgaacgtaccgtttatgtaccgtgtccatgaagatccgaaagaagataagcttgagcgtttcttcgagtttgtaacgaacttcggatatgcggtaaaaggacgtgcgaatgaagtgcaccctcgtgcgctgcaacaaattcttgaaatggttcaaggacagccagaagaagtagttatttcaacagttatgcttcgttctatgaagcaagctcgttacgatgcggatagtttaggacatttcggtttatcaactgagttctacacacacttcacatcaccaattcgtcgttacccagatacaatcgttcatagattaattcgtgaatacattattaatggtaaagtcgacaatgaaacgcaagcaaaatggcgtgaaaaattacctgagattgcagagcactcttctaatatggaacgccgtgctgttgaagcagagcgtgaaacagatgagatgaaaaaagcagagtatatggttgataagatcggtgaagagtatgacggtatgattagttctgtaacaaacttcggtttattcgtagagcttccaaatacaattgaaggtcttgtacacgttagctacttaacggatgattactaccgttatgacgagcaacatttcgctatgatcggagaacgtacaggaaacgtattccgcatcggtgatgaaattacaattcgcgttattaacgtaaacaaagacgagcgtgcaatcgactttgaaatcgttggcatgaaaggcacacctcgccgtaagttcaaagatcgtccagtcgttatcgaacagccaagaacaggcagaaagaaacgcggtggacgtagcgagcgcagtagcgagcgcagtaatgagcgcggcggtgaacgtggcacaggtagaaaatttgaccgtggtggcaaaggaaaaggaagaggatctgcatctgcatccgcttctgctagccagccaggaaaaaaagatggtaacggtaagaagaaaaaagcattcttcgaaaacgtaccaggattcaagaagaaaaagaaaaagcgtaagtaagaaaagagtggcttcgctttgatgaaaagcggggccgttttcttttttcttcgtggcttgagagcgagccactttcgctttttattaacatttgttacaatagtaaaaatagaggagggacgttatatgccaaagggtacaggtaaggttattgcacagaataaaaaagcatttcatgattatttcatcgaagaaacatacgaagcagggcttgtccttcaaggaacggaaattaagtcaattcgcgctggacgcgtaaacttgaaagatgcgtttgcacgtgtacataatggtgaagtatgggttcataatatgcacattaatacgtacgaacaagggaatcgtttcaaccatgatccacttcgtacgagaaaattacttctgcataaaaaagaaattgataagctagcgggcgctgcgaaagaaacaggttacgcattagttccacttagaatttatttgaaaaatggatttgcaaagatggcacttggtttagcaaaaggtaaaaagcaatacgataaacgtcacgatttaaaagagaaagaagctaaacgtgaaattgcacgcgcgttccgtgatcgccaaaagatgtaatacagatatttacatttgtaaaatggagcgcgtatgttataataacttatgtaagattgttgcacattgaaaaacagctcttagtagctatcacgatattttcttcgtatgctccatttttatcatggggacgttacggattcgacagggatagttcgagcttaggttgcgagtcgaggggatcggcctcgttaaaacgtcaaagcctataattggcaaacaaaacaatctttctttagctgcttaattgcactaaaggttcctccctccatcgtccatgtggtagggtaagggactcaaactaagtggactacgccggagttcgccgtctgaggacaaaggaagagaacaaccagactagcaacttggaagcctgtcgataggccgaagagttcgcgaaatgctaatatatcgactacactcgtagaagcttaagtgccgatatttttggacgtgggttcgactcccaccgtctccaccaatacatatttggtggtttttttattttttataacaggaagcataagatggccgttttggtcaacttatgcttcttttagtttacggccaacttatgcttccaggatttgaagaatatttttaatgtcgcctttaaataaagtcgcgacttttagggatagcatcacatcatcatcaatctaagaatagcaaataccccaaaacgaaaaaaatgtacatttttttcgttttggggcgttataaaatccttaagttgatgggcatatggcgactcatttctagaattgttttcatgtgtcaatgatagaaatatatttttaattatggctacttttcaactagtacgatatcatcaagataggcatcaccgatgttaacatatccattaatttgtaagatgaccttatatggattattagtatttagagtagtaaattcaaccgatttttgttcatactgtgtggaagtaaacgtcataacaaatgtgttttctcccccaggagactgtgctcctacaaataaggttttttcaggacccgatacttttccagatgcggacatgatgtatgtagtattaggcttcaaagttacgtctcccttaagatgaccagctcctgaactaaaatgaagtcctttagaattatttactcctgcatgctcttcaatattgtaaattaaagagccatatgctggtttaaaaggttctaaacttgaattgtggtcaaaatcaatatttaaaatataagggttctccttctcatttaattgtacattatcaaacttaaccctcccatttgctgtagaagcaagtttgacagcaaagtttgacacatcttcccctgttttaaacttcatctcatgatgttccggcttaaatcctgaatattgcttttttgttaatggaatgatttcttgatgggcattcagattacctactgttacttctgatggagaacctatacttcccgctatatcaaatgttaatgtatattctgtattcggctttacagtaacaggctgataggctgtgtcggcatgtattaatttgagataatgattgcctggttcagaagtgccgatattctcggtagaagaattaggattagataaaatccagttatttagcccatcctcaaaatctccattcttaacttgttcatttgcagatgaactatctgctgatacaatacctgaaaaacctatactggcacttaatacaattgctgtagaaaagactcctataccgactttttttaacaatctcttcatctcctttggtcagattaaaatttactttttcatatttctatatatgtttggataaacctgacaaagaaccattttaacaataaataaattatgtatccgagatttaggttattttcatttgaaggagtagagggagcaaccgtgctgtgaagtgcaaagtagctccatctatccctaaatggtcctcttccacccaaaaacaaggagaacttttttattgctcaagtattaggggtcaccatacatgcccatcaacttaagaatttgcactacccccaagtgtcaaaaaacgttattcgccatttgataggtctcataacccttttgatgaagtttatggggtgagctgcttgagggaaaacctcacgagcagttcttatggggagaggctggaaacggatcacaactgataccgcgccagtcttttacccgacaaattttgttcaaaatatggaaatctttttttaaaattgacaggtgcaaagaaattaagaaagaacgcttagaatgccatttatatgggcaactcattagtattttactctgtttatcgacgatgttcaaaatgcgtcagttactcttggataagaaaaagaaagagttaagtgaatacaaatccatctatatgataaagaattattatcaattgttttatgagggactacaaaagagcatccatgaattattaaaagttttgctgcgtttgttttaccttttagagaaaaacgggagaaaatctcatcggtatgaaaagaaaaccgtttttgatattttaggtgttgtgtatgattatatgttgtcaaaaagtttcaaggttgcataatattttttaaaatgcccagttaataggtttatttgttatgcctatctttagaacagtcgtagaaatttaaaggaataatcctcacatataacctcttagcgccctaaggttgatggcgatgtggcggcatcccattgctatcaacctaacagaacaggttgatagcaaaagttttttatacaaaataacatcaaaaaatacgtcttgaacaagtgttaaaaaagaaagctgaagggcaagtatatccttttggagtctttttaagagaaaatgatacaatgaagataatattaggaaattatggggatgattacgttgcttactttaataaaatttgtagttagttatgctgcaagtctatttgcttttatttttggatggttcttaatttcatatatttttaatcctagctttattcacccggacgttttacagggattcataaaaactatcgtcacttatggtagtataccagctcttatagcttgtttacttggggaagtcttatataggaaaattaaacgatgtagagagtttcaatttggaattcctttatttataggactagcattgatctatacacttatactatatctttttctttttacttttactttttcacatttctttgacttcgttgcacctgttattatgggttccttagcattttatttagtacgtagaaaaatataattttcgttttgatgcattataatagctatctctgaatcaccagtttcaaaaagccttcatgcaatgatgattgcatgaaggcttttgatgttttcttatttttttgtatcgttaacccatgtaataatgtcctggatgacgtattcgggaacgttagcagggatttcgtattcactaggaagacttaattctccgtcaccctccgtgaagaaatgattcaatttcggatattttttgaactgaacattcccgcggtttgaaagtcctttctgccattttgtatattcatcttttactgttacttgataatcacgtgctccttgcagaatgagtaaaggctcttttcgtgattttgcctcttcaactggacgcaacctagaaacatcatacataaaatgaggtgacccaaaattgtagccagctggaggatggtcaggattgaaagtaggatcctgaataaaagcagcctgtctttttagttcatcgatttcttcctttggtttcctaaggtattgatactgatcaatggcaatgtcagtcaaagggcgtgcaggtggtgcgagtaagatgcttcctcggacaagtgaggaaggtgctttgcttagtatacgtggcattgtgccagctcctaggctatgtccaagaatgaaaatattatttggatcaatgccttcctgctgcactgctgactttgctgcatatatggcatcatctgtagtatcacggtctaacgtaacaggttctgcactcatctttaatgcatgttctaaggtgcgtttttcatagcgcaacactgcaattccgttggatgaaaggcccaccgcaaggtctcgtaagatttttgttcccatatatgtgctatcgcgatcatggatgccagcaccatgaacaagaacaactacgggcagcttttcaccacgcttatgtttcggaactgttaatgtggatggtaacggataggtagaatttccaatgacgatttcacgttcttgatagaaatcaggttgatcatagctaggatgggggatggtaaaatattcctcgggtgacctttctccaacttcatctactttcccgccaggtgtgaatttaaggagtagcggtatggtagttccttcggtagctgctggaatttctaccgtctgatggaccaagtttcgttcttttatcacgggggttcccatgctttttatcctgctccagccactttgtgtccaccagttttgtaatgtggttgctgtaaacttggattgaaaagcagcagacgtcaactgtattgcctctgcatacttaccttgctggagatattcaaaaaataatgatgtacgctccattaaagagactagtttcttttcagcagattgttcctcatgtgtatctgcgtgaatagttgttgtaagcgggaaagatgaaacgcctaaagaaaagagtagggtaaaggtaaggactgatttttgtattttcttttttttattcatgtttcaacctccaatatgtgatggtacaaaacaggtatggtaattagaattctggtgcgaaaacttcaaaatatttgcaagcaatctccaaaacttggacatactaatattattattctaaaaaaatgtaaatttcttctcttgttacatgcatattaatcccagaaataatctttcttccttcactttatattttgattatacgaagcaaagctctcgtttttcttacttgatacttacaaattccttaagtagaggatattttaaaattttggctgtatgaatatgtagcggtactcctatgttaagagatagcttaaggaccgaggattatattgtttttataaagagttgatgttatgtttgttttgtaacatatggtgttttatgcatgtaggaggatttattgaagaaattattaatattgtttttattagctacattttgtctacagattacaggatgttctaataatatgggtacactaagggagaagtctaaaactttaacaactgtgaagtctaaacgcatcaataaagggtggtacaaacatatgtaatagtttgtatcaccctttgttgatgttagaagtcataaggaaaaggttgatagttagatatttttcataaagaaaagacacccatataagagtgtcctttctaatagttttttagcagaagcaactgcatccgataatgattaatagtataaagagtacaacaagcaaagcaaatcctccagcaaaaccacagccttctccgcaactaccaccatagcccataatagttcctcctttaggtaagaggattaaaactaaggttcattcatgtattttaacgggttcactttactttatgtttttaagaatgaatggagcaggtccttttaaaaataaagaaaagacccccctaaagtgccttccttcaacttgaaccatcttaattttaataatatattggactcctatccgaatactattttactatgctaatttttttgttcattgaggggtagcaccacatcgctatcaagttaagtccatacaacgttaattatagtagaggttgtttcttttttttaaagctatgtgtagggaatttaaagatttgcatacgaaataaaccctaatgggtttcaattttttgatttaagccccttgattatcaaacatggtacaattgtaaatgacacctaatatatcaaagattgttttcttctcatatcgatgagatttcctcccgttttgctgtaggaggttgaacgggcgaagtaatacctttgatagctcttgggtgtctttttgtatcgattggaaaagaagaaaaaagtaatctttaatcatatatatggccttatattcactcagttctcgtttctttttcataagaagtaattgacgcatttgaaacatagtagacgaacagagtagaatggcgatcagttgcccatacaaatggcattctaatctttcacgttttatctttttacaatggtgaatatgaaagaatgacttccatgttttaaataaaatctcgatttgccaacgtaaagaataccgatcatgtacttgtcccatcgggacaatatttgtagaggcgtttgtcatatatacattgataccactaagtcgtttgctacgaggagaatacttcattcctttctttttttctcgtatagcttgatcacgtaatcgtttttgttgttgttcatctgtaagtcgatgaacaatcacacgagctggcactttatcagtcattcccacataagcgtcggatatttcatatgtttgtcctggctgaagagagttcattaaaacctccatatctatttggatatactctgtacccttcttaattctgccatcttgaaaataatcagggtttagatttttttgataaatacgtgtatttgatttgatacgtgagatataataagcctttttatcttgtatatgttgaagatctttcaaatgaaaataacctaagtctcggatacataaatcattcgctgttacagttggggcacacagggaaccgtaggttcgatcatgttgtttacctggacctgtatgaatatgaaggaattgtccacttaataaaccatactcaagctgtatctttactcccgctgtatggctgcatcctcccgcaccaggataaattgatgaaaatatatccggaagttgaaatgcagttgaatctaaaatacgaatacgcttgaaaacagaagtatatggataagaaattggcatagatgaggtcagtttttggtttagtagttcagctaatatgtgttgtaaaaattgaacagccgctttattaaatcgttgattcaagccctcagggctgatgagtacttctgttgatgcttctaaacagctagataactgagttaaagaagtcatagctacattttggctcacccatacacataaagcgactaaatcttttgcttggtacttactggttcgttgtacaaagccaacatctctagcaagatttcgtaaggcatttggagatagggcactttgaatctcttgagcaaatagttgtaattcgttagacacagaaacagacataaaaaacgccatcctttcctatgattctacagaaagaatagcgtattttttcgttattttatagtaaaataggtctcatggtatgaatgtacaatttagatatttgcccaatgaaccatatgcttttagaactgagaaagaccttgaaacaaataagttatatattttaatgcagtaatattacaagcagtatagatgggaacatcaagaacttaaatgatttaagattcacactatataaaagttgaagtatacgactaaggaaagagtgctttgcagtgtgctgcatattcaagaattaatcttacgtagggagtgcttatatgaaaagcatgaaaaatgtaatattgctagtagtatgtttcatatttttaagtggttgtaatcaagttaatgaagatgaggtacaaaaatatataaaagaaaaacacggaatcgatgttgttgtaacacatatgagccctttaaatgaaaataatatgggacatgcataccatactgtgcaagcaaagaataataaaaatattcaatttcgagtagaggtagatggtctcttctattcatccataaaaagtgatgaatacaaatatggaaaaaaaacatttgaggcatatcagaaattccaaccaactctagaagaaataaaaaaattagggtacgtggaaactaaaactgataacactcttcaatatttgtcagaggatagaagatcagatgaaggaaaaccaactaatgaattattattaactttgcaaatgagtaacgagattgactttagccaatttgaatcagtagaattagatcgtttatatactctatttcaactcatccagaaaaataataaaaagataacagaacttgaaattaaggattataatggcaaatctttaggtggaccttttaaaaatgtgcaaaaaatgataacaaaagaagagctgttactaacaatgaaaaaaacgatgggcaatgccatagacatttatttggaaaattggattaaaaatcatacaaaaatagaagagagattaattgcaattcaaaacaatcattttgaattggaaggtattacttattcaaatttgaaagatggggatgttcgaggatataaggtgtatttagttattaataccagtagtaatgaatttgaaaataatccccttgtaattaaagatttaatcaaggtaaccacaatccttaaagaagaactatataataaaaaatttaagatatatttagacaataagaatggaacaagatatacaccttggttatcatcagaagaaattaaaaaagctattaacatcgaagaacttgtaaaagagcgatatcctaagaattaaatttaaagtactgttgctgtttgttatttgatgggaaagcatgatatttcgatttgttccgccagcttgcaaattaggggtctgttgtaaagtttattaacaggtagaaagttagaataagtatagccgaatctgattgaagaggaagtacgacatcatcttaaattaggggtacagacacatgcccatcaacctaaagttttaatacacccccagaacgaaatttttaggatttcttgtaacgaaaaagcttatttatcgttttgggggtgaactgttttcttaggttggtagcgatgtggcgagacccctaccaataaatagatagctaatcagtaatgtggaaactgaataagcaaaaactctcatacatgttgcaactccaattaaaataagacaagctagaattgccttttttgctccatacttcttattcaccttaactgtaaataatgcaaacacgcccatacataatacgggaatagatgtttggtggtgtaattatttatttaatcgtttcagtaataactctcgtaagctgtccgatagtgcatccacctcaattatctgttctattgcttctatattgtatttgtcgtggaacttaacatgattgacttgtgaaattgatacttttttaggatgcgatgcaacgagttgtaaaaaaaaacgacctttaatcaatccttttttttacatttcctttttctaaaaccacagaaaagataagtactatagttaacaccataataaaccttacttcacttccatcacttagaaaaaatgaatacaaagtataaattaaaattaatattccataaataattttgtacaatgaacttccaccttctcctatatatattttagtataaaagtttaattcaagtcctagatcaaaataaaaataaaaaggacctgtgatgtacacaaagtgcttttctcttgtcaatttatctattttcactatacttatctattttctttttataactcaaacttcttagaaccgtacttttagctttttgcaattcattttatttatatggaatatgtttttatctgtctgtacatcttcaacattttctccatctactaatggcgtgccctgttaatactgttgtaaccccctccttttgtttgattacttgtatcataaaacaagtatctgaagtttatatgtagtctatctagaatctatgtaaattaaaaaaatttctaacaaactgtttgtattgtaacgttaccaccaaaactattgctctaaacaccataatttgaagaaacagtaccccatgttctaaccctcaattcctcctacacctctatgttgagtaaaactagttaatctctataatataaaaagagcaccccttttgggatgctcttcgttataactatatattatttaattttcttcatttgttggtaccatttttccttgttgagaatccgtacctgtaccttctgatttttcaacagtttttgcatgttttccaggttgtgattctgtacctccatttgtttctaccatttttccttgttgagaatctgtacctgtaccttctgttctttcaacagtttttgcatgttttccaggttgtgattctgtaccttcttttgtttctaccatttttccttgttgagaatctgtacctgtaccttctgatttttcaacagtttttacatctcctttagatgctggcactgcatctttaggtaaatcaaagttttgtgaggaagacgttgttccatctgcactctgtgtaattacttgatttgaattttcatttgactttaaattgtccgttttcgcatcatctgcaccaattgcaccacccgctaataatcctgtacttaaaaatgctcctgctaataatgttttaatcatttttcattacctcctgtttatttgtaatattcatcaaaaaagtatctagagttaatgttttagtcattatctttatctacttgctttttgattacatttagcataaggcaagaatctatagttgatatggactgtatctggagattatgtaaagaaaaatagatgatcaattgtatatcctaatgaatgcttagacaagattaacattttatatgagtttgatagttgaattatcctttgtttttgattgtaaggtttatggctggggtaaagcaaattaaggacctaatcttttctaatttggaagtaaacttttggataaaagtttacattggagttttgaatcatttatagttaattttgtaataaatttctcaatattgatatacttgttaattatggttttaatattcaaaattaataaaaagtattgtagttcttgtgcgaaaagattcagttcatttgagatgattgggttcatcaaaaacgccatcctttctgtatatttctacaaaaagaatagcgcttttttgttttatggatacagatttatcttagcttaatagcaattagtgtaacatccatgtgtatacatggtctttttcatactgtctacctaaaggggataatatcaatcaaaagcgggcttttgatattctggtttaggttaactgcaccactttaaaacgaataggactccccatcagatggcactaaaatagtgttagataatcctttcttatcaataaagtcattcaattcctttctggttaataggcaatggttaagtgattccatatgagaaacgataattttggcctgtggtgctgcctgttttgtgtcataaatatcctcttttgtcattgtaatagggccaccttctagaaactgagcagcacctccattgatcacaataacttcagggtcgtgcgtgtcaattgcttgttgaacatcgttacaccatattgtatcacctgccacatacaatctcggctcgtctggatgattaaatacgatacctgatacttcaccggtaaactttgtgatttcgccagttccatgttgtccatttgttttaaatagcttaatttcttctatgttggtaacatgctgtaaagattctatattgtgaaagccttctttattaatagcctcaatatcatgttcattttgtgcatagatttttatatccttaggtaaaacttttttagcaacttcgtcaaagtgatcaggatgtaaatgcgtgatgataaccgcatcaacctgaataatttcttctatagaaattggtaaactaactaacggatttctcatatcttgatttggtgtatttggaaacggtggaatggatcctttgtcagctaaaaaaggatcgatcaaaaacttcttgtctgcataatgtacaacaagtgttgcattacgtataagtctaatatccatgcggtattcctcccttttatatgattcaacaatagtataaaatatgagagaaatcatgttacatagataaaatcaaaaatttataaggtttgacttgaaatgtgaaaggatgtgtcacggtgttagatgatacagataaaaaaatactagaagcgttattgaaaaatggccgtacgtcaatgaaggaattaggagaaaaagtccatctgacagggcaagcaacctcatctagagtaataaggctggaagagaaaggcatcatagaaggttatacgattaaactgaatgaaagaaaactaggttactatgttcacgcatttataaatatttatacaaggagcattcaacacagttcctatttatcatttgtaaaaacacaacacgaatatatcataaagaacttcaaaattagcggtgaaggttgttatcttctagagtgtaagtttccatctaatgaagcccttgatcaattcttaactcaactaaacgaacatgctaattacaaattatctatcgtaattaaatagaagaaccatcgatataaaaaaacgctattcttgctggagaaatatatataaagaatagcatttttttcattttagggaaatgttgttttataatatcccaaaacaagattttatgctaatttgtaataaaaaagctcattttttcgttttggggctggtttgtattcttaagttgatgggcatggggtaccgtctgcattttggaaaaaccccatgctaagcaaaaaatacgatgagccgtccatacggacggctcatttacataattttcgttagcggaagttattttaaaagttctattaaacaacaaaaacagtcttgattaatcaagactgtttttgtttgtgaaaaatttatctatcagtttagaatctttgttgtttagtaaaataccttgtgtatgttttttgtctgtatctttagcaattgtaatttcgtttttatcattgatcaaaacgaaatattgttctttggaatcatcttttaatgtaactgtcatgttagtgtggattgaatcttttgtttgtttatctagtgagatttctttaggtgttcctgtttcgatagctgttttgatagcttttgttatttcttcattgtctgttgttgatttagagtggctatcttttccagcggaatctaatctgatttcctgtatatctttctcttttaattggatagttgcactttcttttgtatcagtaggttttgatgaagaaagattagaacatcccataggaattaagaataatatgctaagagaacataactgtagaatctttttcgttttttttcattgttttcaccccttccttttaattgtaataatattctgataaattcgatagactttttatttgaatacctttatgtatgattaaaaattggatgtataccatatgcatatgaagttaacataacgtctcattatcagtagcaaagagaaagacgttcccttactctcacaagggatttttctttttctatgactctatgcatctttatatacattcttattctggggcgccttttggcttccttatagttcccgatgtctccctattttttgcataagttcttgcatactcttagcgtgttttttttccgaaatgctggcaggacacctaataacaacactataaaaagacttaaattcctcataaggattaagtcttttttcatctcacctttatataaatataaaacaaaatataaaaacacttagcttattttttgtttttggaatacctaatttcttaagttgatggatgtggtgctacctctcatatatcattacccaatatttttcttctagctcaccttcttcaataacttttttccagcccatattctcataaaactttaatgctttttgatttttagaaacacactttaatcttaatggtatattcatcttttctatggaagcatgaagtaactgtcttccaacccccttaccaaagaactcaggatgtacaaataaattgtgtataaagttttcaggtaaatataaagaagcaaatccgaggatatgattatcttcctctgctagtagtatatgttctccttcagtatgtttatcaaaatcttctacagtcatttcatttctatctagccaatgaaaactttcacgccgtgattctaaatatatccttcttaaattagggtagtctaatgcagttgctactctaatattcattttctcactctctcttcctttttttaattaaataaatctaaccgtttctagagtaaacggttaaatttacgagagaaatttattcactcgtatctctttaaaacaatggctgcattatgacctccgaaaccaaatgagttagatagacctatatttattttcacttggcgagcaacagatggtacataatccagatcacataatggatcaagattttctaagttaattgttggaggaactgtcccttcctttaagctcattgctagagcaattgcttcaactccaccagctgcccctaacatatgaccaagcatagatttattagctgttaccggaatctgataagcttgttttccaaacagttgcttaatagccatcgtttcagagatgtcccccacttttgtacttgttgcatgggcactaataacatcaacttcttcaggcgatatattggcattttttaaagctgatctcattgcaagataagcacctttaccttccggatgtgtagctacgatatggtatgcgtctgaacttgcaccatatccaatgacttctgcataaatctttgcctctctatgtaaagcatgagataaagattctaagattagaattccagctccttctgacatgacaaatccatctcgattttcatcaaatggacgactagctttagtgggattatcgtttcttgttgataatgctgtagcgttaccaaaactggctattgataagtctgttatagctgactctgttccacccgcaaatataacgtcagcttccccagaacgaattagtctaaaggcttccccgatagatgtatttccaattgcacaggcagaaacaggtgacatagaaggtcccatcgcattccacttgatactaatttgtgctgcagcagcattagacattatggcaggtactagagttgggctgactcttcttggtcccttctgcctaagtgcatcaacattttcaatcaaggtttcaatccctccgatacctgaacctacgtatacgcctaacctttctacatctatacgatcgaggtctaacttagaatctgaccaagcttgttcagctgcagccaaagcaaattgagaaaaacgatctaaacgtcttgcttctttctttcctaaaacttcatctgcatcaaaatcttggacgatacctgcaatttttgttttatgattggtaacatcaaaagtatcgatattgactataccagattcccctttaattagattgttccaaaatgttttgatgtcgtttcctataggagaaactacgcccataccagtaatcacaactctttccactttgcaatccctccaatcaataatatacttgtattttacagtcaatttatcctattacaaggggggatttatcctagtataactactactaggataaattgataagataaggagttttaaaaatgaataataaaacaaggcttaaagctctgtcggcattcttaaaagctaagcgcgcccaaattagtccagagtctattggtttgtctgccggaaaccggagaagaacacctgggttacgaagagaagaggttgcgcagttagcaggtgtaagcaccacttggtatacatggctagagcaaggaagagatataaaggtttctacaatcgtacttgattgtatttctaaagctttgcaattaaataatgatgaaacagactacttatatgacctggcattcgaaacaaattcagaaagtacaagtccaaaaaaggatcaatcaaagcttagcccttctttaatacgaatactagatgaattaacatattgtccaactatcattacggatcgacattgccatattatgggctggaatcctgcagctgctcatgtttttttagattttgaacaaataccaaataatcaaagaaatttgattcgtttagtattcactagaaaagagttaaaagcattggccgtcaattgggaacatttcgtgaaaggttttcttgctattttccgtacctattatggacgctatttagacgatgaatggtacagccagtttattgaagaaatgagtcgttcccatccagaattccagaatttatggcaagaaagtcaagtgagtaaggctccagacatgataattgaattcagacatgctaaagcaggcaaaatgttgtttaatttaacttcttttcaagttcaaggtgatatggatttacggtgtagtatctatacgccagtaggggaaacggatacagaaaataaattaaagcgattaatgaagagggtatccgttgaaaattaataaagtaagttcattacattagcaaaatgataatgattactgaacaaagtcattattccttatgggaaaaagagttaactttactttttcctttttgttcaatgggtggatggcgttagttgaaggatcatagaaatgaacagacttttttataaaagaatgaatcaattaaataaagtaagagcgtgtttcgaacaatttcagaacacataggtcatttatctctttgttctgtacccattaaagatttccacagtactaggtcaatctatcttgtttctcgtacagaaaagataggacgagctcttttttaaacatttatgacttagcccccatatctatcaccctaacaaaaaaggttacccaaaaactataaaaatgaacttcggtgctgtaaaaaacacaaaattatcgtttaggggcttctttaaagtcttagcttgatagcgatggtgtaccgccacattgctatcaagctaaggctaagaaagggcagtttcagaagggattttttcttattctaaaaaccagtgcaaatcattggggattctgcatatcaaataaatcctaacgggtttcatttttaaaattaagcggcttaattatcagacatggtccaattgtaaacgacacctaatatattaaagactgttttctccctgtatcgatggggattttcgtccgtttcgctgtaagagtttcagcaggcgaagaagaatgtttgaaaatctaatattttttagaatcgtaacctttataggtggagttgtattagtaaattcatgatagctataataaaaatttttaaacaataccaattaattttgtattttaaaattaatacttgcaaatccaatacaatctgtatacagattgtatacaaaatgtaacgagaggtgaaaatgatggcagaaacatatcgtaaagctaaggtattaaaatttctagacaaattacgtgaaatgaaagagatgaatataaaatattcacagatgtatttgataaacttaaaagaattaattcctcatatggagaatgatatattttttctggaaaatgtagaagaaatagaagatattttagaaaatctacagtttaagaaagaggaagaaaatattgttttatcaagagagcaactcatgttttttaaggaagcaactaatgctataacaacaatcaaagatatcaatattattttggaagaagctggagagttttttgacttagatattcctgaaagaaaagtgaaatctggaatggtaaattacaaaattcaatccattgatccaatggatatgactggtattaaaaagcaatattatattatgttaggggaaattggtgtatcataccctgatggaacaggcgatgaagaatttgtagcggctgcaaataaagtatttctggagtatgttacacataatgatattacaaaagtagatgatggttttattgtttcgctaccggtatttgcttctcatcaagtgataaaagatttaacgaatgcagatttaacagttcttgcaatgattcctataaaagaaaaagaataagaagtcatagaaaataagtaaatggctgaattgaaaaatcaagtattagagattttagaggaaatatgtgaaaccgatataataaaagaaagtccataaaaagctttgaatttcttgagcaaatagttataattcatcaaatacagaaatagacatacaaaaataccaccctttcctatgattctacagaaagaatagcgtattttttattttagggggatttttgaagaaggaattaatacaatatgtaaaaatactctgctatctagtgaacagttttatactttccgaataatagtcaaataaatggatgatactatacttatataatcattatcaggagaatctgcagatttgcaggtccttttttattttatcgaaagtaaacttttagccagcagtttattttcctactattgatttttatacgtatttggtgaaaaatcaaggagctgcaaaaaaatactataccgaaagttcggtatagtaacgtgcatataaaagattccatcttggtatatctccgaaagagtcataaaaatctatgtttttttaattcagttgtaaactacaaaacttctttttaaagaaatgtatgtacatacaaattatattttattccataactctctaacttttgttcacgatagtctgatattgaaaaaatataatatttggtacgacatcactttgtttttttataaagttttgtaattaaactataatattgtattttttttgtattattgaaattagtaataataaaatgtattattgaaaagcacaatttataattcaagtaatcaggactatgcgcccattataatttgaacattcagaaattataatattgtctaaaaatgaggtgagattcatagaaacagtacatattaaatggtatggaatgtatagtataaatgatttttataatagggaagaagcttctaagaaggggatatttgcaatctctagagtatgtgctaagagtgtaacattgctatatataggacaaaccaaaagaagctttatacaaaagataagggaacttaataaggagtggcctttcgatgagagcgaattaaagattacattaggaataatagaatttcctagtggtgaaatttactctgaaaagaaggtaaaagagataaaatcccttttgattttacgacataccccattagaaaacgaaacatctttattatactatagagggaaatttaatttaaaaattataaataagggaagaagaggtttaattgttaaaaagctttctacaggagatctaatatggacataattggaatcacctttgaataaaattgaaagtttcttaagtgcagaagcttatctatttttaatgtattaaactattttgaataacatatgtcagatacttgaaaaaacacaaattttattatgatatgaaatcctgtatggaaagtgtagtttatttctattgtttaataaaaatattaagaattttagggataatacataaagagtagaggagaaagtaaacacggaggtttgaagaatgggacaagtaagcagatttcaagaaaaacaacagaatcgtcgtcaaaaggcaatttttaatattgcatttactttggtattagtgacagttggtatagtgacataccaattgtttaccccttctaatacatcaacgaaagcaattgctcaagaaaagaaagtaacaaagatagaagagaagaaaactgaagataaagaaacagcaaagatagaagagaagaaaactgaagataaagaaacagcaaagatagaagagaagaaaactgaagataaagaaacagcaaagatagaagagaagaaaactgaagataaagaaacagcaaagatagaagagaagaaaactgaagataaagaaacagcaaagatagaagagaagaaaactgaagataaagaggcagcacagctagaagagaaatcaaaaacagaaaaatcggtaaaaacgaacggaactgaaaataatgaggaagaaaaaacggcatctcaagaaaagggttctcaaactaatccttcttggaagccaattggtaccgagcaaggagcaaaacctgaaatgaaatttaaagaaggaacagtagattggagtgagatgaaaaaagcaatttcttatgctgttgatgttccagagagccaattgattttcgattttattgggaataatggtaataataaagcctacggtaatgtacgagataagcaaaataataaaaaatataaggttaatattgattgggtagaaaatcaggggtggaaaccagtatctgtacaagtggtaagataaataatagaaatgtaatgatgtaaatcagctgtccatatggacagctgattattttttttgcttagcgtatttttttgaaaatgctggtggtacctcgttgagaaacatgaattaaatctatattttgttttatttacctcactactttatccataacttctttatatttataatagtaattagtttcaaataaatagttgtagggaagaaaatgttccttgtaagtagtaagcatcctttgcaattttactttataattatttataaaaaagaaaagacaccctaaggtgccttccttcgacttgaaccatcttaattttaataatatattggactcccatccaaatattattttaccatgttaaattgttttattcattgagaaatatagtttcattttatatttaaaagaattctataggctagaaccacctattaattagggggaactgacatgttaagctaatattatagtacttctagaacggaaatttttttaaatatgtatacgagccacataccaaaaaaaagacactctcaagagtgcctctccttagcagccgaatccgccgccccaacagctagcgccaacgatgattaataagatgaagagcacaacaagtaaggcaaatccgccgccgaaaccacagcctccaccacaactaccgccatagcccatattaactcctccttccataaagaccatttattaatggatttaatttaatttatgtttttaaggatgaatggagcaggtccttaaaaaaataaaaggattttagaagttaaaaagagttgacgaccttatttttgtcaccggtatccccccttctacatattgtattttattctgtgtattgggggaaggaggatcttatggctaattctgagatgattttacgtttacttacggatttaaagattgaacaacaattgttgaaagaacagttagagaaaatgcaaacagctgtgactattcttgaagaaaaatcagtgacgcttaaagaaaaaccagcgacgcttaaagaaaaaacaatgactcctgaagaaaaaccatctgttacaaagcaaagagctttttctggacgcccaacatcctttcgtgattggagagcatctagtcaaaaaaattagggaatgttatgtgaaatgataaatgaaaaagtacagtctgctgtagaaaagactgtacttttttatgttagtagagaatgttaagggagacgtatttattttgcctattccaattccacttttaattggagctctttatctaacttatcattattaaattttaaagttaatcctcgcgtgtttttcggtacatcgaatacaatgtttccgtccgaatgttcatcagggttaacaataccaaatttaaatgtagacgtatttgcagctttaagtacggattgatattcattagaaatgtgatattctcttccaaatccatcaattaatttaaagttgttaatatctagtgtaatgggttcttctttacgattataaactgcgatgtctaatactttaaagacaccttgtgctttaacttctccagtccctataacatctaatgactcggcagatcccattgacatgtatacatcagaggaatctacattggtaggaagttctttttgcgaatccttgctgctaagtttgtcattctctgtttttttagaagtcgcctgctcatttttcgcaggcgcatcatgtgaaccgcaagctgatactccaaacaagaatgtgctacataataatgaggctaataactttttgttcatcgtttcttccttccaaaatagaagcactttaatgagtgctatatatttgtctttatatgtattacattttatatcttattatattaattttggaaggaaaaggggaaatattgtgcatttctctgattcgagttatttatccgtctaaaagttgaaattaaaatgagccccataaatgataaaccattccactaacaaaaaacactaatcctaaaaataaaacaattaaagcaagtattccatttttattatgttccataaaattagctcctttttcatttacttacatacaaaaagcctttagtcgtaatgatggctaaaggctttggtcattatacttttgtggtcaatattactttatttagctgtatctgagtaatattcctcagcacgaaactctttaataagtgatatttcatttgtatctggattaaacttaaatattttaatttgatttgattcgtctttgtatgcaaatgtattctcaccaacttgggtcatattgctggtgtttaagataggatcgctaccgtgatcagtaatttctacagttttctcccggtcccaaaacgcaatgacaataatcaaaatgataagacatacccgtataaaacgtaattctcttgcaacaggatgttccatctgttagtctcctttactgtttgatagagtctgtttataaaagagataattcctaggaatataaataaaaaagacaccgtaaagtgtcttttttattttagttatgcgcattacttaataagacgctagttcctcagtctggctatgagtaactatgtagggtaattccattataacattttaaccagtaatgggtctatatggaattttgttgattttctttttgattattcagaatgacttgccaagtatttggatgaggaaagcagtgagacagaagcgactaaacatgttttagaagagtgtcttcttttttgtatcattgtgagtaaagtgtagagttatatttccctttacacaaacataacggtataatatagttaagttaagtaaacttaactattaagcaaaacgaaataaaagcatggaggatgctatgactagaacgtataaagaagtaattaatgaaatgaatcgagcctatacggaactctatattttactatttcaagatttaaaggatgagttcggtcttactgggcagcaagagagcatgttatttcatattcatttaaatgaaaacacgacagcaaataacattgcgagtacgtttaatataacgaaaagtgctgtgagccaagttttatcgaaattggaaaagcaacagatgatttcgaaacaagtgaatcctaacaataaaagggagtatttccttacgatcggtccaaacggtagtaaatatatcgaaagattgtctgagttagatgatgtattgatcgagaaatatttctcgaaaattgatattggagcgttgcagcaaatgactgatacgttaacgaaaataaataaagtgatattggaagaaaagcagaaggatcttgagtctaatgagtaagaatgaagatgaagcaattagtagaaaggaggagaagcgtgtgatgagttacataccaaatatgattacgatagcaaattttgtgtgtgggcttttggctattcacgctgttttcgttcacgatatgcatggtgcagttatgttcattattacaggtatggtatttgatctgtttgatggtatggtcgctcggaaactagatgctgcttcggaaataggcggagagttagactcatttgcggatttagtgaccttcggtgtggcaccatctattcttgcctatagtgtcgctttaaaagatttgcagtttatcgggatgatatgtgcgctcgcttatagtatttgcggaatgctgcggcttgctagatttaacacgcaacaaagcaaactcccaacattcatcggaatgcccattccatttgcggcaatgtgtctcctcattttatgcctcctaaataacccagtttccgtggcatttggcacatgcgtactcgcttatttaatggtgagtaaaatcaaattccctcattttaaaaaagatatatcggaaagcttgaagtccgaaagatgggattaataggaaagataaggagcataatatgattcgtatggcattaagatcattcaacatacaaatatattgtttattaggcgtgatgttattgggatggttgctgacaccttttccagcccagtttgtagggataagcatcggccttttagtgagtatgtactgcgcctggattttaggaaggcgtatcgaaaagttcggaaatagcatcgtaaaaaaagaaaaagcaccaatgctcggcatgatgaatcggtttgcagccgccatactcggtgcgattattatgtatgaaattgaacaccgtgagtacatgtggacatttgcagctggaattatgggtgggtatttcctgattattattaatttgggctattacagtatgagggatgagaagaaataaagtgctgtgtaaataactaatttggatgatttgaatgtaaaagcctcaaaactttcttttctagagagctttttattacaaagaaaagacacccatatatgaagtgcaccccaattgttagacacataactaacaattggaggtgcattttttaataccctagaggctgcctaatgaaacgacctgtctaactttcgggggtcacttcaatataattagatggcttttgtatgttactctatcgtttcaacttcacgtggatttttcatctcttccacatacacaactctaaatccgtgatcttctaaatcttccaataatgtctctaattcaccgtcgttaaactcttctcctaatgtaaacataattctacgaactaataaggcatcattatcaaaagtcatcaaactttgaataccagtgtatttctttaaaactgtcgataacttttggattgctccattatagtcttgcgttccaatcatgacagagtatttactagagtgaacgccccatgcatcctctaataactcaaaaacttttttatgcgttaaaattccaaggaaaacccctttttcatcaactactgataaataaggcaatttttttattgtaaaaaatactttaaagaaagatgaatcttctctcacaaatccttctttatcgtttaataattgtattacactctcatcaagtgatcctttatattctaaaatatctactttatatatattccctaaaaatttctcttttttttcatctaaaactggtacacaacgataccccgttttatttaaatgctctaacgcttcccctatcgtaatcgaacttgagcacagtaaaacttcccttttcggcacgtaattccctttaatcctcataaaaagcctccttatgttaaaatactttctgtgccataactatattatattttcagaaaaaaataaataatttattttatttttctgaaaattattcattttcttgtcataatttattcatgaatccttcacttgtatatttttgctatcaaatcttctctctgaattactaaatgaaaaatatattgtaacttctttcaaaaaaagctaaaataagaataagaattttctgaatattctaagagtaggtggttatatgtccttattacgctcacatatatgtaaatttataattggtattattgttatttttgccataagtcctattccagctctttttattacacacaattattcttatcaaaatgaatttattagcatttttcaaaacttcgcacagctttcttctatatcaattccaaaggttgattggatgcatgaatctatctttttctcagcaaaccaaatgatacatacttctaatcattcaacaccattattcccttacatatgggaaatatattttatatcgattgttcgttttacttttacccttgcgatcggatttttcataagtttgggtatcggccatttatttttcaaagtacctaattcgtttaaaaagtttactactgtattgaaatggattccttactctttttgcactgtagtattacaatgttcagtcttattactacttctatacatcgcacaatttataaaccttccttactactcatcatttatcatcgtatgtagtacttccatgattatcgttatgcaagcagtaaaaaaatggattcctttcttaaaaaacacaaatgaatatgaaataaaacatgattcttttcttgtggatacattgtttttggcgcttacttcgaatcataaatcaattttaggttccattattctttcattcgtttttatggaatgcgtttttcatgcaaatggactgttacaatttatcgttcaatttggcggaaattcacccataattgttacaatcggcttattactactctatatcccatatagcatactttctttccttcaaacactatggaccacaaactactccaaacaacagtcatacactttgacgagaagtgttccaaaaccttaatttaaaataaccctctataatctaaaagtagggggttattccttttgtatagcggacaaaataacagcaaattcaaaaactattacagaaacataccaatatttacccttttcctttgactattcttttcatttggatttattataaaagtataacataattgcaggaggtgacatctttattccaaaccttggaatggagaacacgcttggacatattaaatatttttctcatctttgtacttattcttatttctggctttttcgttgcatcagaattcgctgttgtaaaagtacgaaaaagtcgaattgaccaacttgcaaatgaaggtaataaacaagctttagctgcaagaagcgtcctatctaatttagatgtttatttatcagcttgtcagctcggaattacaatcacttctttagggcttggttggcttggtgaaccgactgtggaacatatactacgaccgctctttgaaaaaattaatattactggaacaatggctaacactttatcttttgttattgcttttagtgttattacatttttccacgttgtattaggtgaattagttccaaagtctttcgcaattcaaaaagcagaagcgatcacactcaaatttgcaagaccgcttattttatttgataaaattatgtacccattcatttggctactcaatagtacagctatatttttcacaaaattactcggattagaacctgcgaaagaaagtgaacttgctcattctgaagaggaattgcgactcattttaggtgaaagttttaaaagcggtgaaataaaccaaaccgaatataaatatgtaaataacatttttgaatttgatgatcgagttgcaaaagaaattatggttcctcgtaccgaaatgatttgcttatctactgaaaatacgttagaagaaaatatggatatcgtcgctactgaaaaatatacacgctatccaattatcgaaaaagataaagatgatatcattgggatgatcaatacgaaagaagtattccatgatcaaacgaaaggtatttataagccacttgaatcttatatacatcctgttctaactgtatttgaaacagttccaattcgtaaaacgttagtccatcttcaaaaaaatcgcgttcagatggcaatcgttatggatgaatatggtggtactgccggacttttaacgatggaagatattcttgaagaaatcattggagaaattcaagatgaattcgatgcggatgaatcacctatgattgaaaagcgtacacctaagcttactgttttagatggaaaggtgcttatttctgaagtaaatgatatgtttggcctacatattgatgatagtgatttagatacaatcggaggatggcttctttctcaagcagttgacttaaatattgaagctggctattccattgaatatgctggttttcaatttaaagtattagaacttgatggccatcaagtcaaaaaagttgctgtacataaactagatattaaaaaggagctataaagtgactgttttattaacaatttgtatcattgcctgtttcgttgtttcatttctcgcctttatttatccaattatccctggcatactagctgtctgggctggatatttgatttaccatttcggtataaatggaggcgaattaacaacttctttttggattattcaagtcatttttactcttttcattttcgttgctgattttattgcaaatggatatttcttaaaaaaatacggtagttctaaatggggcgaacgtgtcggaatgatttctatcattgtcggatcgttcttcttcccaccattcggacttattatcataccgttcttatcagtatttataacagaactagtgcataaaaaagcgccaaaagatgcctttctagttggagtcgctactgtagttggttttttaagcagtacagtagcgaaagcaattctccaaatcattatgattatcatcttcttgtgttatatcatcttttaaccatcccgacttcgggatggttttttaatatgcaatacctactcgactattttcatatatgtttttcttacatagatcccatgcaaagtgtgctgtatcacccactgtaatttttgatccaccctctggcaatatatctttttcagttcgatatacctctgtcgcctcaccatctattaaatgtgtcggacaaacaactgtccaacataaattattactattacttagtactttatatgcagccaaatgatcttccgctgccgttgtcgttttccttttggattccgttgattgaaaacgatataaatttagatttgttcttgcttgtaaaataccagctgttcctattgttatgattctacgaaccccttcttcttccatttgcttaatgatttgtggcatactcttccctaatgttccattttgatccgttccaagtgcactaattactatatcgcttccttctatcactttctttatatcattttcgttcaatacattaccttctatcactcgtagcctttcatgttgtatttctattctatttaaatcacgcgctaatgcagtcacttcagctgaatcctttaatgctaaattaattatgtttgaacctactcgtcctgttgctcccaatatacatactttcatttgttttccccctctttcattctctttctatttttcaataatctcaataaatttacaacaaaaaagcttcctcatatatgagaggaagctttattattactttatttcttttctttagaatcagtagacttctcggttccgcttgtttctttatcctttttatcctcttgttgtgttgttgtgtcgtcttctttcttcttgtcctcacctttactacaacctaccattaataaagaacttgcaagtgccatagcagttaatgatttaacccatttgttcatttgcgtttcctccttgtgatagaatatgtacaacctcatattactctctatttttaaaggagagattgaaaaatagtaaatatacggtaaatttttgtaaatcttctgataacaaatcctaattttaatttatatatttcatttccaatcgatacacaataaaactagttttttctctcaatggacgtaaaaaaactaaggcgcataccatttcgccttagtttctcatgcaaacttttcattttcatatagatgtgtaatcttatattccttcttcataacatattgccacacactataagcgtaacggttcattttcaggaaacaattttccaaaaatgagcgaaactctggattagcaacttccactgcaacttgagcaaactttaaagctaatcgtttcaagtgcgcaatataactggttgcaatatgaatatcccctgtatatttactaactgtttccttttccatttcatgcaaatcaaactccgttgtttcacaggttatatgttgcacattctctccttcttgaaaatttacttgttcattatatgcttgtaacatatatggtaaatggtgctgtaatagattttttaattcttcgtctctgacctttccagcatactctccaaccttgtatattagtatataactatatctcattaattctttcatacagtccattaaagcgcctcccttctctttcgtccatatactataaatatgatgctaaaacattcgctattcttgctaaaaaccaatcccatctactaattttctcaaaatcttcttcagaaaatcgttttgatttatgaaagtctacctgtaatcgactccatacttcatcaacaacggttttatcatatatgatacagttagactcacaatttaaataaaaacttctattatcaaaattcgctgtcccaatatcaacaatttctccatcaataattgttactttcccatgaaaaaatccatttcgatattgataaatctccgctccagcatgtaacatatctttcaaatatggataggcagcttgttttaacaatatggcatcacttttaaatggcacgagaatttttacattaacaccacgatttaatgcagcttttaactctttcaccatttctttacttggtacaaaatatggtgtagcgataattaaagactttttagcctgctttaatagtgctccatatttttcccataagccttttccatttgaaaataaatattgatatttcacattccctaatgtaggtatactttcatgtataggcattttttctcctgtatcttctttccaatcttcggcgaactttctttccatatccgctgcaccctcaccatggatgcgcacgtgataatcacgccatggcccaaactttggattttgtccaaggtactcctttccgatattaaagccaccgacgtatgatacctttccatctatcgtaacaatacgtctatgatttcgttgatgcaaagaatagaacatatttttcagtttcggttttttactaaatgtaaacttcacaccgttttcttttaatcggctaattacctttttcttcagcttatatccgcctacccgatcgactgacaatttcacttctactccgctagatgcttttttctctaataactgtaaaaactcttggcttatttcatcttttcctacaatataaaaatggatatatatatacttttctgcatcgtttatatcgtcaaataattttctatataactcttcaccgttcgtatatagttgaaattcacctaatcgaacttgtcctaattcatattcactagccatttccttccccatttccacatcgatgttcatccaaatgaatacacctattaaacaaaggattatagcgaaaaagtgcttcatggataaattcctttctccacttactgttatttctatatcttcccttttttattacattatcattcaagaaaatatgtcattgcatgatatatgtccatatcaaacaatagctcatttgcatattgtatgttgtatcttaaaataaaaggaggaaataacaatgggcttcgcacatggtaatggatttgcgctattagtcgtattatttatcctcttaatcatcgtcggtgctgcttgcttctgctaagtagctactgtcatatgatatgtggatgaaaaaactataaaagcggacacctattttaggtgtccgcttttcattttaaaaccatttccgactgctatagtaacttaaatggctaaatattcatctcaaaaggttaacaatgtggctactttcttactctctgccttacgtatatgacgctgttctgcacgtaacacagcaatacgatgtaattctttctcttcttcggtttcagggataacacgcggtactggaactggattattttccttactaagtgccacaaaagtaacgaatgacgttgccgctatacgcttctcacctgaaattaaatcttcagccactaccttcacaaacacttccatcgaagttcttcccgtccaaattacgaaagattcataactaacacaatctgaagaacgaacaggatgtaagaaatcgacccagtccatagatgctgtgacacattcctttcttgaatgtctggatgctgaaatagaagcaaccatatccatctccgctaatatcttcccaccaaatagcgtgttatgatcatttaaatccgttgggaagactcggctcgttttgaacacccttgactcattggctgttttcccctttacttctgtcattgttatcacccctttaatgatctatccctaatatttcaataatcactatactaaatgaactacacgtttaatattaacaacattcagaacttttagtccacaaaaaagaaccgattttatcaatcggctcctctaaatacatattgttctttcggctgttcaactttattccattttgttacttctaatacaggaatattcgcatgaaacggctgataaaactcagtagttatctctccttctacttgaatccagtcatcattattccactctacgccttctggttttttcactaacataccatacacaccagaatctgctacgcaatgtataataccgaaacggaataagaagtattgttcttttttagaagaatcatctctaaaaacaaaccctttaaaagataattttttcccagtaaactcgccaggataattataaattgtttccataccctttaggaagtcttcatctttcaaattaatattgtctttcgtaacaaactctttcttccctttttccattacaccgcggtatccttctttcccgtaataaatgctcgtatcaggtcttaggaattgtcttgtcataaatggatccttactttctgcttgtgcaacaggaaagtgaaagcccttcgctttaacaatatccgaatctagcgtcgcaattgggaaaaataaccctgagataattggaaaacaaaacaatgagtacgaaaatgcttttttccaccatgtattctcatcttttgaatgatcatgcccgcaatggctatgatcgcaactgcaatcatttttctctttttccttttggtgctctttttggaaaacgacgataatttgtataatcgttaagaaacctaaaataattgctgctgttgttgataaataggcatacttcatattgatatacttcgtaatgttaccggaaatatgcagttgcgcaattaatattgtaaaacctaataatatatatgctcgaaacataacctaccaccccatcgcataaatgagtagtgagcttgcataaacaacaagagtaactgtaactataacaacaattacaaatttcgttttaaatgtcgcaagcatcataaacatatttttaatatccaccatcggtccgtaaacgaggaacgcgacaagtgaagctgttgaaaacgtactttggaacgaagaagcgataaatgcatctgcctctgaacaaagtgataatatataagcaagtcccatcataacagctgatgaagaaaatgggccttgtccaatagcaagaagtgttgaagtttgtacaaacgtttgtaccgctgctgcaattaacgcacctagtactaaatattttcccattgagaagaattcctcaacagcgtgtgtacatacatcccacatttttttacgcagtggacgcttattattcacttctgggaagtgatcatctcttaattgatgttctttaaacataaaggataatataattccaacgataatggctacgataatcgctacaatagaacgataccataccatgtgcatactactcccaaaggcaacataagtagcaaataatacaactggattaataataggtccagttaacataaatgcaatccctgcgtatggtggaacgccttttccaattaatcgtcttacaatcggaacaattccacattcacaacctggaaacaacatgcctaaaaaagtagctaataaaacagacagaaatcggttcttcggcatccattttgccaccatatcttctgtcacaaacatttgaatgaatcctgaaataaatacaccaatgagcacaaacggaagtgcttcgattaatatggaaataaaaattgtattcatttgcaggaatgctttcggtaattgaaacaattccatgatgtatttcctccaacttttcattaacaatatgtaattttaaccccatttcattaattggacaaggtttatatgacatacataccctttatatacattacattgtacaagttatattctattcaaaatttgagatttcatagcaaaaaagctgctctagcgtagttatataactatgctagagcagctttcttatcgttaaaagtaacgtttcttccaaaaaacaaaagctaacgtgaaagatagtgttacacatatgatgagtacaattacaaaaccgtgggcttctccttcaaacggaacctttacgttcattccaaagaaactagaaaccatcgtcggtaaagataaaatgatcgtaattgacgttaacagtttcataacactatttaaattatttgatataacggagctaaaagtattcatcattccacttaaaatatgactatatatttccgccatttcaatagcctgtttattttcaattaatacatcttctaataaatcttgatcgtcttcatacatttttaaaaatgtactattacgcattaacttttgaattacaattttattagcctttaatgacgttgtaaagtatactaagcttttctcaaggcctaataatgtgaaaatctctttatttttcattgactgatttaattgatgctctaaatcaattgtttttcgatttatttgctttaagtatcttaaataataagtagaaatcgtatataagagctgaagtgcaaagcgcgtcttcttaaacgtataaaattctttaatacgttgattaataaaacgttcaaaaattggattctcttctaagcagattgtaacaaaacaatccggcatcacaatcatacctattggaatcgtgtcataaatcgaatttccttcttcgtcatgtctaactgtcggaatatccacgataattaaagtattattgtcttccttttcaatacgagagcgttcttcatcatccaaagggtctttaatgaaatctaagtctacatttaaagtttgtactagatattgaatttcttcttctgttggatgaagtacattaatccagcaccccttttgcatttcctcaatctcttgtagttttccgtttcggtctgttaaatatatatttaacatactatcaccccgattctttttacatgtaggaatctacctctcttaaatcacagtttttaaaccgccattctcagcatatgaaacatacgtttaaatttcaatagaaaaattattttgaaaacgtttttataagaaaaatattataaagtgaaactttaatcagtgggagcttcatcccccccactgattttcaaccctcaccaatcgggcttttacggactgcccgcccccaaccaaacttcttttctttcgctgaattttgagatgaggatcttactgcccgttagagcgggataaacatagaaaaagacagagtgctctctgccttaaaagcttatgttgcctttataacatatttagaaagcatccacaagttaaacccgactgaaatcgtatagcccgcgtatgttgaaatgataaaacttacataatcgaaatacggaagcaatacaatatttaaaactatcttcacaataattccaatcactagtcctagcaccgtcttctgctgttgattgattccttgtagcatagcagccgttactgtaaaaagagaaaatagtatgcaagcaggagcataatactgtaaaatgattctccccatctctggatcatttccagcaccaaataaaagggtatatacaggcttggctaacaccatcattccaattgccgccggtaccgtaatcgctactactaatacatttgttctcgtaaaatgtttgtacaatagcttcgtatttcctgctgtataagctttcgtcatctctggtacgagagacatactaaaagctgtcgcaacggataccgggataagcacaaccatttgaacaaggccaattatcgcattaattttttccgcttcgccttgcatataccctatctgtataagtagtttattaattgtaaatgtatcaatcgtctgatacaacggaattgctaagcctactacaacaaaaggaatagaatatgtaaagagctccttataaagtgagaaaaaagatttcgttgtttgtggtatacttgccatttcttttttctttaagtgccttctccttctcatataatacgcacttaaaacagttaatccacctacagctcccataaaggcaccgaacgttgaaataccaactgctagtgaaacagaagcttttaaaacatataaaacgacaaagcttcctattaaaatggttaaaacacgaaaaaattgctctacaactacacttaatgcagaaggccccatcgattggaatccttgaaagaagccccttaataaactcattactggcacaagtattaacgcaaaacttacaattcgaatattagtagtaaccgctcctacactattccccgtttgatcattcccatcgatgacaagtttagctaaatgcggagctagcatatataacgtaaaacacgaaatgactcccattataaacataaacacgattccacttttcaacactctcttaaccgtatgataatcattcagttgatcatattttgataccatctttgaaacagctagcggtaatcccattgttgctatgctgagcatgatggtataaggacgatatgcatatgtgtatagaacgtaaccactcgtaccgaccatcgctgtaaatggtataacatatataaaccctaacatttttgatatcatcgttgccatcgttaaaaatatcgttccacgtataaacggtgaccctttcatcacattcctccgctacgctttattattacacattatggacaactccttttctttagaaccgaaacaaataaaaaagccaatgaaaaatcattgactttaacgcgctgcttttttctttttgaaatactttaaaccaaagtatagagcaataaaaagaacagctcctataattatgtaatgtgtgtaatcagatgcatactctttaatttgtcgccaattcccaccaagtttttcacctaagtatataaatagaattgaccatggaatgatcgctacaaccgtataaagtgtaaatagttttaatggcatcttagctagtcctgctggaatagagatcgcatgacgtactactgggataaagcgcgcagaaaatattacgcctgctccataacgcttaaaccaaccttccgctatgtctaaatgatgtttattaataagtagatatttcccatatttctctacaaccggacgccctccgtagtatccaagccagtataaaaagatttgcgctaaagtaccaccaatcgttccggcgataactgcacccacaaaactaattttaccattcgctactaaaaagccagcatacgaaagtacaatttcactcgggattacttcaatcattaaagcaagagctactccaaagtaacctaagcttgcaaaaaattgcaataactgatctattatgtttgctaacatgttcttttttatctccttttttcttcacataccatcccattattacataaaggctgcaatctgccaatatcttcattttaacaatatgtacaattcaagcaggattaatctattaatttctctttctgcgggtctttcatgtaggcaaacatctctttaatttggtcttctgtatttctagcaattgataaattaggcaattcattttcaccaaaaaactccacctcttctgtttcaatgctagttttcttttctccaccaataatctcacatccaatgaaaatcttatatacatgcgtcgccgatggagatggttgatgtttttctttatcaaatatagctagtaacttaaaatgatctacctcataaccagtctcttcgaaaacttcttttgctgcaacttcggttggcgtataaccgacatcagcccatccacctggcaatgcccatttcccatcgcttttttctttcacaaataataacttttcattttgaaaaacaacagctcttatatcaactttaggtgtttgatagcctgtctcacttgcaaataatttctctacgacttcccaatctgttttcgtgtaatgtgacatcattgaaatagaaatatctcgtaattgctggaaacgctcaatatcatacacatccttagaatacgttaaacccgcttgagctatagattgtatttgttttacccaatcaatccatttaatcgtcatatatccgcatccccattctctatcaaatatattacttcattttcattgatacatctttattatacaaaaaaaaagagattgataacgtttcaatctctttcaaaattaatccaattcatgtaagtggtcttgtatatactttcttctcttatttatatattcataaatcatatcagcctcttgatcaaatgtttctaatttttctttcatgtatggatcttgtagtaaatatggacgaatcaattcacacaacccttctactttcggcctcataaacgaaactgtaaattgatcttctaatatttcttctaaaatacttcgatactgctttctaaatacaggtatgtctagcaatcttgcactcaacgtattatacccttgaatgcgaatatattcatgattaagcggtctcccttgtacatctcgcccccaagtcgcatcataatcccacggtataacttcaaataaatttgtttcatcgttatgatatagtgcatagttatgaacaaaaccatcaaagttttgcgtaaaaataactcctgctaaccatcgtaaatatttatctacatgtagaaacttcccaatttctttttcataggcttccctcgtcaaagtattcgcttgaaatacaaattcactcagttgttcttcactattttcattcgaatatttaaattcataacccgcaaagagctctgtcttaacatctttatctcgttcactcattaatgaaaaattcgcatcatcatctatcgcataataaatagaaccactcggtaatcctctattttttaaaaaattttcatcaaccgattctaactgtaagtacacaccttgaatttgaccattaatttttataaatacatgttgtgattttggcgaaagtacaccaatatcatgaaaaaaatctaaagataatttatttcttatgagagacggatccataaactccgaattcaaatgaaactctttcgcaccttgaaattttttaggcttataaaacataacatgataagactttttctcaaattcccgaatatgagctcctcggtatacgatatcaatatcatacttcttttttccataagttaattttgctggcactggactatctgaccaaatgtcctttttcaattccactaagtacattggatgaacaaaaaaatcatatgaaggcagcatgttttctcatcccttctcagttctcttcattcaatgtatgcgccttgtcttgtccatacatccgcaatcatctatttatataaaattacactcttgtcctgttcagaaagatgcctacatacatatcatgttaaggaaaaagaataccttttcactttaatacatgataaggaggatttctatgaaacgtgatattagaaaagctgtcgaagaaatcaaaagtgctgggatggaggatttcttacaccaagatccaagtacttttgaatgcgatgatgattgcactacaaaaatagagtgtaacgaagattgtaaatgcccaagaacaagatgtactcgcgtgaaacattgtacgttcgttacaaaatgtactcacgttaaaaagtggacatttgttacaaaatgtactcgtgttcgcgtgcaaaaatggacgttcgttacgaaagtaacgcgtagaaaagaatgcgttttagttacaaaacgtactcgtagaaagcattgtacattcgttacaaaatgtgtacgctttgaaaagaaattttactggactaaacgatgttactgtaaaaaatgcgaattcttccctaatggacacggtggctcttgcgacgattcgtgtgatgacggaaagaaatggaacgattgcaaagatggcagacataaattcccatcttgcaaaaataagaaattcgatcacttctggtataaaaaacgtaactgctagtttttataccacccaaaaaaaggccgttttgcggccttttttacatttattgaaagtgacttatatctgcaaattgtttcactttaccaataccctcttcaaattctattatgctcaaactggcactatgcataaatggatcatcccacacattttctatttcaattcccgcgaaatgccctacaagtaattttgctgctgccgcatgagacacaatcaatatattttgtcctttatgcatctctaaaagaagctgcatcccttcaattactctttcataaacggcctcaaaattttcgcctgatgttgactgaaaaagatgtggctcattccaaaacagatgtacttcttctggaaattgcttttctatatccgcgattgtttgtccttcccatatacccatgttgatttcatagaaatgctcatccgctataatgggtatatcacgttccccctttattaactctgccgtatgaagtgttctttcgctcggactactatagatcgcatggattggtaaatctttcattcgatttcctaattgtttcgcctgaactataccattttcagttaaagcagaatttttccgtccctgcattcgcttcgctacatcccactctgtttcaccatgccttgttacatatatagttgttttcatttcttactccccctcaccatgttggtcgtaattcccacggttcaactctccctacaatccactccgctcgtttactttcaatcctttttataattccatcagctatctcttgatgagtaagccaccttccatatgtatcttctaaaataaaacctaaaataattctatgataaatacatcgcgtactccctattttttgtgcaggcatacgtgatgctttactacctaaaatatgaaataaactctatgttttagacgacaaatctagttctttacaaatatttgatagtgcatgctttgcacttgtgtgtacccatgcaacaactaatgtgatcgggccatttttcttaattgtacttttaatagctagctttacatcttcatcattatgataatctaacgaaaggcatgtaatattttctggtgcagaactcattcgcttaacattttttaatttcacttcatctcgtccaataatagaaacataaaatcctttctcacaaagccacatagaaactttctttagcattcctgtcccaccaattacaagtgcatgcaaatgctatccctccctaataaaatgtcatatgaggtttctcatctctataataatttaaacggtcttgcagtgtccctgagtgaaactcaaatttatgaccgtcaggatcaacaaagtatatagattcgcaatctcttacatcacgttctcttccttgtaaaatatgaacatcattttcttctaatcgctgtattagacatttaaagtcttcttgttcaacagaaaatgcaatgtgcgtataagattgatgaatctcatttctcggaatatgcgtctcttcattaagcgctatccatactccacatatgttaaaataagctaattttcttcctttaactaataattctccttctaatactttttcataaaacataatagagttttctaaattagataccgaaaaacaaatatgattgattcctcttaacaactataattcctccttatacaaataaaagatgagcgaaaattcactcatcttttattatactatttttttgtaatatatgcccatttataactgaagtccccgccaaacgtatggttagcaatgccttttacaaatggcttctctaaataagctgtactttgttggtacgtaggagaaattgctgcgtcttgaccaattaagattttttcagcttccgcaagtgcattccagcgtgctttatcatcttttaatagctctccttttgatttcgctactaaatcatcatacttcggattagaataatccatttcattaaatgagcttccagtaacaaacatatcaatataagtcattggatccggataatcagggctccatgcagataatgagaattcatattggaatttcttttctaaatctagcttctgcttgtatggttgctgtttcaaattcactttaataccaggcaagtttttctctagttcttccttaataaagtcgcctacttttttacggctaccgttatcatcgtttagtaattcaaccgtaattgtatcttgaccaagctctttcttcgcttcttcccataatttttttgctttctctgcgttatctttactatcacggaagtttttatttacagagcggaaatcttttccatccggacctgtcgtgaatttttcaggtactaagaaatatgctggcaatgaaccgtcatttaaaatgacatcagcaattccttttttatcgtatgctaaatcaatcgcttcacgtactttttggtttttaaatgttgcatttttttggttaaaacgtaagaaatatatgcgcgggtctaacttcgttttaaattcatctggtttattctttttatatttatcaacaaattcagaagttaaaataactcgatctgcttgatcactatcatataaatttactcccgtgcttgtttccttcacaatacttacattaatttcgtctaactttacagtatctttatcccaataattaggatttttctttaactgataattttgttcatgtttccattgactcattgtaaatggtccattatatactaatttatctgcttctaatccgtatttatctccttgctctttcacatatttttcatttaatgggaaaaatatagggaacgacgtaagctcaagaaaataaggtgctggttgctctaattctactaccaacgttttatcatccttcgctttaacacccagttgatctaatggtaattctcctttatttactttctgtgcatttttcacatcaaataaaatgaatgcatattctgccgctgttgctttatctaatgtacgttgccatgcatatacaaaatcttgtgctcgaactggatcaccatttgaccatttcgcatcacgtaattcaaatgtatatgtctttttatcttcactaatcttcacatcttttgccatacctggtgttggtttattatctttatctagacgatataaaccttccattgcatttacaaatacacggaaagatacagaatccgttgatttagatgtatccattgaaggaatttcagctgtttctagcaaatttaaaacttgtttatcggccattcccttattcgattctttcttcgttgtcgaagccttctcaccattcccacaccctgcaaccaatacactcgtcgttaacgcaagtgcagcaattgttgttgtctttctcttcattcttccttcccccaatctatatgtataagttaaatcctatataatatattttattatacaaaagattctgattattttaaatatttattttaacaaacatagaaaaaagcgatcggaaatttctttccagccgctttcttgaatagcatttacttgtaatccatcctctatatcaaatggattttgaactttaaatatttcttccattagcttcaaaaactcttcttcagttttagattcaccattaaccataaatgagtatggttccacttcacctaatttataatcgacaacaaattgaatcttcaccttttgtcttggcgttccggtgttatatccttggaattctactaattctaacccttccgttccacgataatatatccaacctgaattttgaaaataattttcgaaagattcacctattgaaaagaaaggatattcataaagcgagcttgtacgaaccttttgaataacgtctcgatcagtcggaaaaaagaaatgactaaaaaatatgctagcaactgctaaaatagtaacaattgtcgctcccattttgctcgttccgccgctatcattgattagatagttttcaactgatttatcttttatttctcttgcttttattcggtatatacgtctttccgcaaattgatagtacaatccatttgcaaaaatccccattccaaacagaataaaaatgagtaataaaaacgtaagaggcaccatattaatgattggcaacgctacattaaatcccatataatacgaaaatgcatcacacgctactaataacaacataaataaagcagctggtacataatacttacgatatcctagccagcctatattgaaaatagcagcccaaccattccagctccacctagcaatccgcttattctcaagctcccatttccttttgtaatacggatattgtctccctacatatacttctagttctttatctattaacgagctaccttcatcttgttcattatccaagtttcgctgacaacttgcacaatttaactgttcctcctcgcaaggttgcccacaatttatacatttcaaaacaatccctcttcccatccatacgtcatttcaaaataccttcgtgttttaataaccactctttcctccataaaccaccagcatatccaacaagctttccactcttccctattacacggtgacatggaacaattattgaaattggattccgactatttgcccctcctattgcccgtacagcttttgtatttccaactttctctgcaatatctaaatatgaagcacttacgccgtatggaatagtataaagtgcatcccatacatttttttgaaatgctgttccctccgcagacagcgggaccgtaaactcttttcttttccctttaaaatattcatctaactcatttatacattgttctatcatttcatttttattttcttcttgtcgttcatcaacaaatataacagacgtaattccttcttgattcgctgtaatttcaagcaaacctacttcgctttcataataagcctggtacatatgccatcctccaattcagttcatattagtcattgtaacacgaatatacaaaatttttcgtataagcgttttattagagaaacaaaaaagagaatgatacaatgtaagaaaattcaatctaggaggctattggatgaattccgaacttttttcaccttatacaattaaggacgttacattaaaaaaccggattgttatgtcacctatgtgcatgtattcatcggaaaacggggatggccaagtaacgaatttccatctcattcattatggaacaagagctgccggccaagttggtttagttatgattgaagcaacagccgtgttacctgaaggtcgaatttcaaataaagacttaggcatttgggataacagtttaattgaaggcttacataaaacgactacttttatacatgataatggtgcaaaagctgccattcaactcgctcacgccggaagaaaagcagaactagaaacagatgcgttagctccttcagccattccatttaatgaaacaatgaaaatgccaatagaaatgagcaaacaccaaattaaagatactgtattagcttttcagcaagctgcagtacgatcaaaacaagctggatttgatgttattgaaatacacggtgctcacggttatcttattaatgaatttctttctccgctttccaataagcggactgatgaatatggtggttcacctgaaaaccgctatcgtttcttacgcgaaatcatcgactctgtaaatgaagtttgggacggaccgttatttgtccgtatttcagcaaatgattatcatcctgacgggctaacggttcaagattacgttcagtatacaaagtggatgaaagaacagggaatagatttaatcgattgtagttctggcgcagttgtaccagcacatattgatgtgtatcctggttatcaagtacaatatgccaaacatattaaagagcatgctaacattgcaactggtgcagttggattaattacgaccggagtacaagcagagcaaattttaaataataacgaagcagatttaatttttatcggacgtgaattacttcgcaatccgtattttccaagaatagcggccaatgaacttggctttgaattgcaagaacctcaccaatataagcgagcaccaggaaaaattcatacgaataaataaaaccgagaagtcattcttctcggttttatttattctatcgttgtaatttcatttgaattataagtatggatacccgattcttctcgcagcgcggttatatacatccctttcgccacatctttagctgaaattggtttatattttttgaaagctcctttaaagataaacggaataatacgagataacttttcagccattcgttcgccgaaacgaaattcttgtcgatttcctactaataatgatggtctaaaaatgtgaataccaccaatcactaacttttgcaattcttcttccatttttcctttcacttgtgaataaaagaagaatgatttaggattcgctcccatagaagacacgacaaggaaattttgtaccccttgtttttcagctaaacaagcagctcgtaacgtatattcataatctacttttttaaaatttgcttttgtttttgctttttttattgttgttcctaagcaactaaaaacatcatccacagcaaagaactctttatattcctctaataccgaaaaatcaacttgtttctgctgtaacttctcatgttgcaattgcattggctctcttacaaaaatagtaaccgaatcgtagtaatctgattcaagtaatagacgcgttatctcttgtccaactaaaccacttgcaccaagtattaacgctgttcgcttattcatatatgcatatacctcttattttacttttctctcctttagtaaaatacaacctttaggagtttcctgctcttattttaccacaagtaaaacactatgcgtacgcatagtgctttactcactcttttttctcatctctctcttgtaatttcgttattgttgtagcgtccccatgcccatcaacttaaggatagaaactctacggttttccattaattgaaaaaataccctatagaatagacttttttcaagtgtctattctatagggtacattttaaattgaaagagtcctttttttatttactagatgaagtttgtttcaatacaaattgctcgattgcatgagcaacaccatgttcattgtttgttagtgttacaacatcacatagcttttttacatcttcttcagcgttgcccattgcaacagataaacccgctacttctaacatcggtacatcattaaaattatcaccaatagcaactgtatcttcaatagggatattaaaatgagctgccatctgctgtatcccgtttcctttatgtccattcttatccataatttctaagttagtaggagccgatgctgtaaccataatatcagcatcctcttgtaatatacttaatagctgtgcgcgatgcgctgcattaaacgttaaaatgaagaatttagatatttctagttcttggttatttacaacatcttctatttttttgaaatcagtaattaggttcgatttcttttgcttttctgtaattcgttcaagttcctctaatgtaacatcaagcgcatgcttattttcttcgaatgcttgcatcacttgatcttgccatgtatatggagaataaactcctttatttgtatatagcttatatgggaaaccttcagattctagtaattttgcaagtttgtacactttgtcgttttgtatacaacgcgagttaattacttttccatccacataaacaatagccccattgcttgctccgactggaagagataatttatattcttccaatagctttaaagcatcctctttcgcacgaccagaacagatcattacaatatgaccggcttcttgtgcagtttggattgcttgtaggttttctttggagatttcaagattagatgatagtagtgtaccatccatatctaatgcgattaatttcaaaatgaccacctctttgtttttattatacatagttatatagaggaaacatataaacttatcttggaaagacggtattttatctcatattaaaagtaagtaaagattagataggtttagtggcactaaataaacaatttgtaacaaaaatagagaggaatatgactacatttcactttatgactgtaatgttacacgaatgttacaaacgtgaacttagtgaaaaacgcattaaataaaggtttttgagggttatcataaaaaaacgtaaaaaaagtgtaataaattttacgtaattatattgcaacgtaataatagttatgttacattaatgttacaaacgttacgttatcaaatttaatgtaacgttaacataaaaactatgaaataaacatttcttagaaattacatatagataacttataaaaagggaggataaatgatatgaaagagcaagtattacaagtaacaaaaggtgacttcgtaggatcagcaagtggagcagtagtattaacagcgttaatcgtatttctatcaagcgtattagtataatagaagctttgtaacaaaagaaaaagaagggagaatgaaagatatgaaagagcaggtattacaagtaacaaaaggtgacttcgtaggatcagcaagtggagcggtagtattaacagcattaatcgtatttttatcaagcgtattagtataatagaagttttgtaataaaagaaaaagagaggagaatgaaagatatgaaagagcaagtattacaagtaacaaaaggtgacttcgtaggatcagcaagtggagcagtagtattaacagcgttaatcgtatttctatcaagcgtattagtataatagaagttttgtaataaaagaaaaagagaggagaatgaaagatatgaaagagcaagtattacaagtaacaaaaggtgacttcgtaggatcagcaagtggagcagtagtattaacagcgttaatcgtatttctatcaagtgtattagtataatagaagttttaaattaaacaaaaaaggaaggagaatgagggatatgaacagtgaacaagtgtttcaagtaacaaaaacagatttattaggatccttaggtggagcggtaatattaacatcatttattctattccttgcaaatgtattagtatgagatatataaatacaatcattcaaaaaaaataaagactctaacgtattagtaagtagttaatatgttggagtcttttttatattcttcttatataccctcaagtattaaagttacctcattatccagcattcatggctaattaaacgctgcggttgaaacttgattcaacgaataatcaaaaagccactgaataaaatcccgctttatttcaaagagaaaaaagtcgaattttatatgtaagaaaaaaagaggaatttgacagaaaagatagaaaattttaaaggtcagaatttgttagcttgctaactaatttctattaattaatgttggaagcgttttcggttggttttaagtatggaccatttaatctatttacagggggatgaagatattatgaaacaaaaatctatggatacgctagctgcacaaatggaggacttttttccagtacgtgatgtagatcatttggaattttacgtagggaatgcaaagcaatcgagttattatcttgcgagagcgttcggattcaaaattgtagcttactctggattagaaactggaaaccgtgaaaaggtatcttatgttcttgtgcaaaaaaatatgcgtttcgttgtgtctggagctttaagtagtgaaaatcgtattgcagagtttgtaaagactcatggtgatggcgtgaaggatgtggcactacttgttgatgatgttgataaagcatactcagaagcagtgaaacgtggtgccgtcgcaattgctccaccgcaggaattaacagatgaggacggtacattgaaaaaagcagttattggtacgtatggtgatacaattcatacgcttgtagagcgtaaaaattataaaggggcatttatgccaggattccaaaaggtagaatttaatattccatttgaggagtctggtttaattgctgttgatcatgtagttggtaatgttgaaaaaatggaagagtgggttagttattacgagaatgttatgggctttaaacaaatgattcattttgatgatgacgatattagtacagagtattcggcgttaatgtcaaaagttatgacgaatggaagtcgtattaagtttcctattaacgaaccagcagacggaaagagaaagtcacaaattcaagagtatctagaattctataatggagctggtgtacaacatcttgctttattaacaagtgatattgttaaaacagttgaagcgcttcgtgcaaatggggtggagtttttagatacacctgatacttattacgatgagctaactgcacgagttggaaaaatcgatgaagaaattgataagttaaaagaattaaagatcttagtagatcgtgatgatgaaggttacttactacaaatctttacgaaaccaattgtagatcgtccgactttatttattgaaatcattcaacgtaaaggttctcgtggatttggtgaaggaaactttaaagcgttattcgaatcaattgaaagagaacaagagcgtcgcggaaacttataagatttgtatccaccagcaaaagtccctttgctggtggaaatttcatttttataaggaggaatcaggatgaaatttgttacatttcgtcttccttcaaaagaactacgggctggatggcttgaaggtgacaaagtaatagatatgaatcttgctagtgaagggaaaatcccttcttctatgatagattttttagagaaagcggatgagtatgtagaagtagtgcggaatattaagaatccaaataagggtatatatgctttagaagaagtacaattgacagctgctcttcctaatccgagtagtattcgagatttttacgcatttgaacaacatgtaaaaacagctcgtggacgaagaggattagatgttgtgcctgaatggtatgatattccggttttttattttactaatcatcgtgctgtaattggttccggtgattttgtaattggtccgaaaaagtctaaaaagcttgattatgagttggagattgcttgcgtaataggaaaagaagggcgaaatatttctcgtgagcaagcagaggaatatatttttggttattgtattatgaacgattggagtgcgagagacttacaagcaacagaaatgaaagtaggtctcggtccagcgaaaggaaaagactttgcaacttctttaggagcacatctcgttacgaaagaggaattagacgtttatcgtaatggtgatcgatataatttagaaatgactgctcatgtaaatggaaaactattatcaaaaggaaacttccaagatatttactatacatttgctgaaatgattgaacgtgcttcagaggacgttacgttatatccaggagatgtgattggttctgggacagtaggaacaggatgtattttagaactgggtacagaagagtggctacaagatggagatgttgtagaactgtcgattactggtttaggtacactacgtaatacgatcaaaaaagaaaaggaagcgggtgatgggcatgttttatcgtcacatgggagaactacctcataaacgacatgtacaatttcgtaaaaaagatgggtcgctttatcgtgaacaggtaatgggaacaaaaggtttttctggtacgcagtctattttgtatcatcattatatgccaacagaagtaggtcattctgcattatcgcattcttgtcagttgcagtatgaagaggatgttgctctttctcatcgccactttcgaacgaaagaaagtaaaaaaagtggtgatgcaataagtggacgtaatttcatacttggaaatgaagatttgttaattggagtagtgagtccaacagaaaaaatggattatttctatcgtaatggtgatggcgatgaaatgttatttgttcattatggaacagggaaaattgaaacgatgtttggaacgattcactatagaaaaggcgactatgtaacgattccaattggaacgatttatcgtgttattccagatgaaggagagactaagtttcttgttgtagaggcaaatagccaaattacaacgccgcgtcgttatcgaaatgaatacggacaattgttagagcatagtccgttttgtgaaagagatcttcgtggtccagaaaaattagagacatatgatgaaaaaggcgagtttgtcgtaatgacaaaatcaagaggctatatgcataaacatgttttaggacaccacccgttagatgttgttggatgggatggctatttatatccgtgggtatttaatgtagaggattttgaaccaattacagggcgcattcatcagccaccgccagtacatcaaacatttgaagggcataattttgttatttgctctttcgtaccacgtttatacgattatcatccagagtcaattccagcaccatattatcatagtaatgttaatagtgatgaagttctttactatgtagaaggaaactttatgagtcgcaaaggtgtggaagaaggttctattacacttcatccgagcgggattccccatggaccgcatccggggaaaacagaggcaagtatagggaagaaagagacgcttgaattagctgttatgatagacacattccgtccgcttcgtattgtaaaacaagcacatgaaacagaagatgaaaagtatatgtatagctggattgaacaaggttcatatactgtgaaataagtaaaaaaggcatgctctcaataaggggggcatgcctttttcacggaatcgacatgtataataataccaaaaaaataatggaaagatatatagaaagaataataaggatcgtgcatattcagaagaatttctacttgtttcgacaaaagtattgactaggaaaagcgtaatgagtaaaataaaaaagcgaattaaaaattttcagaaaatttaaaacttggaggagtgaaagatgaagcaaatttttcaaaagaagccaattgcaaagttaatgcatgaaagtaagcaaaaaacgttagcaagaacattgggtgcgctagatttaactatgcttggaatcggagcaattgttggaactggtatttttgttctaacgggtgttgtggcagcgaaacattctgggccagctattatattatcatttgcgattgccgcgttagcttgtgcctttgctgcattttgttatgctgaatttgcttcttcagttcctgtctcgggcagtgtgtatacgtatacatacgcgacgatgggggaagtgttcgcatttttaattggctgggacttaatgcttgaatatttacttgctacatctgctgtagcaaacggttggtctgcatattttcaatctttattaaaggggtttggaattcacattccgactattctctcctcggctcctggtacaggaaagggtggaataattgatttacctgcagttctaattattttagtgatgacagttcttttatctaggggtgttcgtgaaagtgcacgagtaaataacattatggtatttattaaaatagcagttgttcttatttttatctttgctggttttaattatgtgaaacctgaaaactggacgccctttatgccatttggtttagatggtgtaatggctggagcggctacagtattcttcgcatttataggatttgatgcagtttcaacagcggcagaagaagtgaaacgtccgcaacgtgatttaccaattggtattattgcatcgttattaatttgtacagttctttatatcgttgtttcgcttattttgacagggattgttccatacggccagctaaatatatcagatccagttgcttttgcacttcaatttattggacaagatggtttagcgggggtaatttcagtaggagcaattacaggaattacaacagtaatgctagttatgatgtatgggcaagttcgtgtttcttatgcgatgagccgagatggtttactgccgaagcgtcttgctaaagttcatccgaaatttaaaacgccatttttaaatacatggacaacggggattattgcggcactgatttcaggattaatagatttaaatgttttagcacatcttgtaaatatggggacattgtcagcatttgcacttgtagctgttgcggtaatcgtaatgagaagaactcatccagacttaccaagggcatttaaggctccgcttgtaccatttttaccagcattaacagtgattttctgtttatacttaatgcttcagttatcagggacagcgtggattagttttgggatatggatggttattggtatagcggtttacttcttatatagccgaaaacatagtgctttaaataatagtaaaaaagaagaagatgttgcaaatttataagcgaaaaaatccattctaattctgttagaatggattttttatttgaaaatttacatttttctgaacttgttataagataattgttggctaactaaaggggtggaatgatgaaaaatacgtggcgtgagttaagggagatggaccgtaacgtatggattcgatttattggagagacgttaaatggaattgcaatgatgatgttaatgcctttttttgcattatatttaaaagataaggtagattcgttgttggaagttggggttattatggcgctttctccaattgctgcaagctttggatcacttataggagggagaattgctgacatatatggaagaaagcctattatgatattttctatggcaagtaatgcattattaatgctcggttttctatttatagaaggatttattccatatgcaattttatctatttttttagggttgagtaattctttatttcatccagctgcatcagctatggtcgcggatgtaacggcaccagaaaaaagaacagaggcatatggtttattacgaatgggacacaatataggtgctgcgattggtccgataatgggagcatcagtagttgtgttgtcaaagaaccttgtgtttattattgcctcttctacaatgctattttatgcgttacttgtattacttcttattcaagagacgatgccaaagagcatagataaggaagaacataaagaaaaggaatctggggcagtttggaaaattgtaatgcgagataaggcattaatgatttacttattagcaggtattatcatttcgatggggttttctcaaacggaaggcatgctgccactacattttgataatgaaatgaagcgtatttttggaacgaataatccatatccatatttaatggcgttaaacggactattagttgttttattccagtttcaaatttcaaaatgggctacggataaaccagttgggaagacgatgttatatggtgcatgtttattcgggattggattattttttatagggtggttaccgaagtggtttggagaatttaatacaaatgctacaattattttaataacactactgttcgtttatgctatatatacgttaggtgaaatgattatgtcgcctgtacagatgacatttgtagcaaatttggcccctgagcatttgagagggacttatatgggagctgcaagtttgcagtggattacaggaagcgcatttggcccacttttgggaggttttttattagatcggttacttggtcaccttctatttacaattttagctgtaggatgtgtagttgcaggtattgtatatgtttctttagatcgccttgttgagcaaaggcaaaaagacacactaaccaaacaatcttcttagtgaataggtgacatacacaaaaaaggggatttctacatattttaggtacataactagattagattgccattttattttgtgtacctatatagaaaatgaaatgaaaaaccaataagtgatgttatttaattatttatggaagttacattttatttcaaataggaactacctatttttataaaaagtgctaaaatagaaaaatgaaaacaattggttagggtgatttcattgacgaaaattaaattaggtttattatatggtggaaaatcagctgagcatcaagtttcgctacagacggctcttgctgctattaaagcgttaaatcaagataaattcgagattcatccaatttatattacagaacaaggtcaatgggtacgcggtgagcgtattgaaggcgaagtaacagatgttgaagctttaaaaatgagcggtgcagaaaatgcgatttctccgttatcattaagtacagaaattatcccatctgcagcttctgaggagaacgctattgacgttattttcccattactacatggaccaaacggtgaagatggaacggttcaaggactattagaattaatgaatatcccttatgtaggaaatggtgttctagcatcatctgctggtatggataaagttgttatgaaaaacatctttgcagaggctggtttaaaacaagcaaaatatgcatccttcattcgtagtgcatgggagaaaaatcgtgaggaagcttattctaaagtagaagataagttaggatatccttgcttcgtaaaaccagcgaaccttggttcaagtgttggtattaataagtgtaaaaatcgtgaagaacttgaggatgcatttgtagaggcattccaatttgatcgcaaaattattgtagaagaaaatattgtaggtcgtgaagtagaagttggggtactaggtaatgatgagccgaaatgttcagttgtaggtgaaatcgttccgaaaaaggacttctatgattataagtcgaaatatatcgatggtgatacggcgctaattattccagctgaaatgacagaagaagaatctaatgtaattaagcgtgatgcgattattgcattccaatcattagacggtgcaggtttaacgcgagctgatttcttcttaacgaaagatggagaagtgtatattaacgaagtaaacacaatgccaggatttacaccgttcagtatgttccctctattatggcaacatactgggttaccgtatccagaattaattgaagagctaattcgtttagcgattgaacgtcacgaagaaaaacaaaaaattaaatatacaatctaacaaaaaaggaggaagcactattcgtaggaatagtgcttcctctatgtaaggagcgtttctatatgataaagcgaatgttaaagcaagtggaacagatggtaaatggtactggattagcagagcaatatgagggaattactattcaaggcgtgtctattgatacaagaaaaattgaaaaaggaaacttgtatgttccgattcaaggggagcgcttcgatggacatgcttttgtagataaagctgttgaaaatggagctgtggctacattatggatgaaagatgtagcgaatccacctgagaatcttccggttatttttgtggaagacacgctatccgcattgcaaatgttagcgaaaaactatcgcgatcaattggatgttaaagttgtaggtgtaacgggtagtaatggtaaaacatctacgaaagatattgtaacaagtcttcttgcgactaaattcaaagtgcaaaaaacagaagggaacttcaataaccatatcggattacctcttaccattttaaacttagaagaaaatacagaagtagcagtattagagatgggtatgtcaagccgaggcgaaattgaattcttatctaagttagctcgtcctaatgcagctatcattacgaatattggtgaggcacatttaatggatttagggtctcgtgaggcaattgctgaagcgaaattagaaattgttacagggttacaagaaggtggcgtgttcgtatataacggagatgagcctttattaacgaatcgtgttcctgaaatgaatttagcagcagaaacggttacgtttggtgatgcaagagcaaacgattattatccaacgactgtaacattacaagcaactgggacacatttcaaaatgaatagagatgaaaatatttcattctacttacctgtgttaggaaaacataatgtgtataatacacttgcttcaatggcaattgcgaaacattttggtgtaacgtgggaagagatgaaagaaggtttagtaacacttcaaatgacgggcatgcgtatggaaattgtgaaaacaaatagtggtttaacaattatcaacgatgcttataatgcaagtccgacggctatggaagcagcattccatttaatgaatggtttagatggttttgctaaaaaaatcgttgtgctcggtgatatgttagaacttggagatcaagaagtacagttccattatgaggtaggaaaattaatcgatccagcaaaaatctcgcatgtattcacatacggtagattaggggctcaaattgctgaaggagcgaaaattaatttccctaatgaacgtgtaaaggcgtatgataataaagaagagttagtaaaagatttacaagcagtagtcgatgtgaaagatgttgtattaataaaagcatctcgcggtatgaaattagaagaagtaattacgatgttgaaataattggtgtatataaatagggatgatagttacgaaaatagaagaaacttataataagcgcttacagtaaatataaaaaaataaaagtgaagaaaaaaactctgaatatgaaaataaggtaacagttgggtttgctttttacacatacaaaacttataattgataaagtgtaataacgtttagaagtattttcgtgaagaatatacgcccgtttatatacgtgagcattcaggaaaagggcttttccgcaaattcggaaaacgcctttttttaaatgataagtataggatagaaaaggagaagtaacattgacaacatttcgagaattaggattaagtgattctttactgcaatctgttgaaagtatgggctttgaagaggctacaccaattcaagctgaaacaattccacatgcattgcaaggtaaagatattattgggcaagcgcaaacaggtacagggaaaacagcagcattcggattaccactattagataaagtggatacacataaagaatcggttcaaggtattgttatcgcgccaacgcgtgaattagcaattcaagttggagaagaattatacaaaattggtaagcataaacgtgttcgcattttaccaatttatggtggtcaagatattaaccgccaaattcgtgctctaaaaaaacacccacacattattgttggtacgccgggtcgtattttagatcatattaaccgtaaaacacttcgcctgcaaaacgtagagacagttgttcttgacgaagcggatgaaatgttaaacatgggcttcattgaagacattgaagcaattttaacagatgtgccagaaacacatcaaacattactattctcagcgacaatgccggatccaatccgccgtattgctgagcgtttcatgactgagcctcaacacattaaagtaaaagcaaaagaagtaacaatgccaaacattcagcagttctatttagaagtgcaagaaaagaaaaagtttgacgtgttaacacgcttattagatattcaatctccagagcttgcaatcgtattcggtcgtacaaagcgtcgtgttgatgaattatcagaagcattaaacttacgtggttatgctgcagaaggtattcacggtgatttaactcaggcgaaacgtatgtctgtattacgtaaatttaaagaaggttctattgaagttcttgttgcaacagacgttgctgcacgtggtcttgatatttcaggcgtaacgcacgtatataacttcgatattccacaagatccagaatcatacgttcaccgtatcggtcgtactggtcgtgcaggtaaaaaaggtattgcaatgctatttgtaacaccacgtgaatcaggacaattaaaaaatatcgagcgtacaacaaaacgtaaaatggaccgtatggatgcaccgacacttgacgaggcattagaaggtcaacaacgtttaatcgctgaaaagcttcaaagcacaattgaaaatgaaaacttagcatactacaagcgtattgcagaagaaatgttagaagaaaatgactctgtaacagtagtagctgctgctttaaaaatgatgactaaagagccggatacaactccgatcgctttaacatcagaaccacctgttgtttcaagaggcggcggttctaaaaaacgcggcggtaacggaggcggataccgtgatggtaaccgtaatcgtagtcgtgatgcacgcggcggtggcgatggacgtaatcgtgaccgtaaccgtgatggacgtaatcgtgacggaaaccgtgatcgcaatcgtgatggtggtagtcgtggtcgtagaggtgaaggccaaggtcgccctggttcttcaaatggacgcggcgaaagaaaacatcatagccgtccacaagcttaataaaaaaagagaatgccctttgcgggcattctctttttttatttctataattgtgcatactacataatagttatgatagaaaaggggctgttatatgcttgtaaggcttggttacgttgcgatgagtgtacatttgaagaatgcatctccatctcaaacgatgacgtatgcacagtttcagaaattaaatgatcgtgctgctgcaattcgtaaacttgaaagaattgctaattccaatttagaaaattgtttacgtttattaaagcataataaagggcatgacatatctttctttcggctcagttcaaagctcattcctttagcgaatcatgaggaattgctagagtggaactatattcgtcctttaaaagaaaatttaaaaaaactaggtgaatatgcagttcatatgaatatgagaattgatttccatccagatcattttgttgtactaaattcacctgaggagagtgtttttaaacaatctgtaaaaacattgcagatgcacaaaaaattattaaaaggcatggggattgaacataagcaacgatgtgtactgcatgtcggaggaggatataaagataaagaacttgcattagagcgctttatagagaagtggtctaatgtcccaaggggtattcaagaaatgattatattagaaaatgatgatacaacctttacgttagaggaaacattatatttaggagaaaaattagatattcccgtcgtatttgacttgcatcaccatatgatgaataatgagcaagaagattggtatgaagattgggcacgtgtcgttcatacgtgggaaacgtctttgttgccggttaaaatgcatatctctagccctagagagggaaaagatccaagagctcatgcagattatattaatgtagaggcatttttatcttttttaagaaggataaagggaagtgttccgcaaattgattgtatgattgaggcgaagatgaaggatgagtctttatttcaattaatgagagatttaagtgaacaagtagatgtagaaattatcgatggtgcaagcttttatattaaataagctttgcaccatcgttttttttggttaaaaaaggggttaaaatgccaccggttattaaacctgttaaatgactgatcggattggcagaagggttaaagaaagtaaatagtagtaatagaagaatcataattgagaaaatggcaatttcttttggttttgaagagcggtattgattgtacaataaaaataactgtgcacctaatagtccgaaaataccacctgatgcacctgcgtgaatatattcaagcggcataataatataagaagaaatatttccagaaattccagagagaaaaaatagaataaaaaaagaaaagtgtccgagttgcttttcgatagaagaaccaagagcaaacaaaaaaatactattagaaagaaaatgttgtaagtctacgtgtacgagaagagaagttatgacacgccaccattctcctttagcgatatattcattagaggctgccagtggtaagagaaaaaagtcgcctaatatcatcatgactaaatgaataagaagtaaggtaagaatagtcggttgtaaagaaatatgagtggatcttattagcatacggttactttcaccccttttgcatcagaaagattctctgttattcttatcaatatgaaagaagaaagttaaatagaagaaggggatttcgaaatgattatagggattggtatcgatattattgaattaaatcgtattgaaaaaatgctagatggaaagcttaaatttatggaacgtattttaacggaaaatgaacgtaatgttgctatggagctgaaaggaagtcgccttacagagtttgtagctggaaggtttgcagcgaaagaggcgtattcaaaagctgtaggtactggtatcggaaaagaagtgagttttttagatattgaagtgaaaaatgatgaaagaggtaagccaattctgattacaagtacagagtatattgttcatttatcaattagtcatagtaaggaatttgctgttgctcaagttgttttagaaagctcgtcacgctagtctgcatattttatatctttgtctcatatatttgaggtagcgataaggaaggtacatcttccattcatttataggggcaaaggggctgaattgatgaaaaggcgtctgtttttagttcttgtcggtttgttgaccgtttttgtgttggcgggttgtgtggaaaagaagcaagatgatgtcgtgagagatttagaatcaaaagtaaaagggatgaaaagttatcaagctgaggcaaaattatctattaaaacaggcaatgagcctcaagagtataacgtagagatttggcataaggaaccgtctttttatcgtgtgaatttaaagaatgcaaaaaaagatcagagccaaattattttgagaaatgaagaaggtgtatttgtattaacgccagcacttaataagagcttccgttttcaaagtgattggccgcaaaatagtagccaggcttatttatatgaatcacttgtaagagatattttgcaggacaagaaaaaccttacttttgagaaaacagataagtattatatttttaaaacaaaaacaaactatcaacatcaaaatatgttgccgagacaagagattacattgaataagagcgacttgactccagtttcagtgaagttactggataatgatcaaaatgttcttgtgaaagtagatttctctaaagtgaaattcgatgcgaaatttgataaaggtgcatttgatacgaaacaaaatatgtctagagcacaggtagatgttcaaacaacagcgaaagaagacaaaccgtttgctattttgtatccacttgatacaccacaaggtatgactctgaaagatgaaaaagagttgaagacagacagtggcaagcgtgcgatactcacatacactggaaataagaaatcctttactttaatacaagaaaaggcaaaagttgcagaggcatcatcagcggtaagtgtaagtggagaaccagttgatcttgggtttacgattggtgcattgacgaaagactctgtaacgtggtcgcataacggagtagaatatatgctcgtgtctaaaggtttagagccgaaggagctgttaatggttgctcgttcagttacagcgaagcaggtgaagtaaacttcttagacgtggtgatatatgtgcaccacgtcttttcttagtttgaaggtggatttcataaaagaagcatataaaagaataagcttcgcatatcgtgtataaggaagtgtatttatggaagaagcaccattttaccgtgacacttgggtggaagtggatttagatgccatttataacaacgttacacatattaaagagttcatcccaagtaatgtagagatttttgctgtagttaaagcaaacgcatatgggcacgattatgtaccggtggctaaaacggcattagaagcaggtgcaacaaggttagctgttgcttttttagatgaagctttagtgcttcggagggctggtattactgaaccgattttagtgttaggtccctcgccgccgcgtgatgtaaatgtagctgctgaaaatgatgtagcgctaactgtttttcaaaaagaatgggtggaagaagcaattaaactttgggatggttcatctgtaatgaaattccatattaactttgatagtggtatggggagaattggaatacgtgaaagaaaagagctaaaagaatttttaaagagtttagagggtgcaccgtttttagagttagaaggagtatacacgcattttgcaacggcagatgaggttgagacttcgtattttgataagcaatataacacgttcttggagcagttaagttggttgaaagaattcggagtggatcctaagtttgttcatacagctaatagtgctgcgacgttacgttttcaagggattacatttaatgcagtgcgaattgggattgcaatgtatggattatctccttctgtagaaatacgtccttttttaccatttgaattagaaccggcgctatcacttcatacgaaagttgctcatattaaacaggtaattaaaggtgatggaattagttataacgtcacctatcgaacgaaagctgaagaatggattgcgactgtagcgattggctatgcagatgggtggcttagaaggttacaaggatttgaagtgcttataaatggtaaaagggtaccgattgtagggcgagtaacaatggatcagttcatgattcatcttccttgtgaagtgccacttggtacgaaagttacgcttattggaaggcaaggagatgagtatattagcgctacagaggttgcggaatactcagggactattaattatgaaattattgcaacgatcagtttccgtgtgccaagaatatttatacggaatggtaaggttgtagagataattaattacttgaacaatatatagaaggtagtatgattgcttcttgtcattggagtgactgttcattgctggataataagctctttttgatgagaagctttttacttataatcattttttatataagttgcacgtaagttttgaagaggagttctattgtttttagttagttatgagataaaaaatttaagaagatgaatgttttgtttgtgaattggaaaacataagcaaggaataaggaagtctttgcaacaggctccatacaatggtattattacaataggtgtcatatatatatttgggtgtgtagttgacggtggaggtgtatttttgtgtccgaatcaagtgtaactactgaaatcgtggttcggttgccaaagcaaatggtaacggaattggacggaattggaaaacaagagaataagaatcgccatgaactaatttgccaggcaacacaattgttattgcgtcaacataagacgaagaaacgctaccaacatgaatcaatgcgacgtgggtacattgaaatgggaaaaattaatcttggtattgcatctgaagctttcttagcagagtatgaagcagctcatacagtagaacgcttagttagcggggggtaatattttgattgtaaaacgcggcgacgtgtattttgcagacctttccccagttgttggttctgagcaaggaggcgttcgtccggttcttgtcattcaaaatgacatcggaaatcgttttagtccaacggtgattgtagcggctattactgcacagattcaaaaagcgaaattacccactcatgtggaaattgatgcgaaaaagtatggttttgagagagattctgttattttacttgagcagattcgaacaatcgataagcaacgcttaacggacaaaatcactcatttggatgaagtgatgatgagtcgtgtagatgaagcgttacaaattagtttaggactaatagatttttaaatcggcagtttaagttgctctctttgaagggcaactttttttattatagaggaggttacggttgtatatggaaatggtagataatcgacaagcgttaatgaaaatgttagtgaaagaattaggctttaccgaaaagcaagttcgtcatgttattcaattaacagaagaaggtaacacagttccatttattgctcgttaccgaaaagaatggacaggctctttagatgaggtgcaaattcgtacgattttagagagatggcaatatatgatgcaacttgaagataggaaggaagaagttcttcgtcttattgatgagaaggggaaactgacagaagagctacgacagcaaattgttaaagctacaaagttgcaagaagtagaagatctatatcgtccatataaagagaaaagaagaacgaaagcgacaattgctaaagaaaaaggattagaaccattagctgaatggttattgttatataagaaagaagatccggctaaaaaggcagtggaatttattaatgtagagaaagaagtgcaatctgcagaagaagctttacaaggtgcacaagacattattgcagaaatggtttcagatgaagctgcgtatcgtagttggattcgaaatgttacttttagaaaaggtgttatgtcttcgtccgtgaaagatgaagaaaaagatgaaaagaatatatatgaaatgtattacagttatgaagaaccattgcaaaaagtagtaccacatcgtgtattagcaatgaatcgtggcgagaaagaagatatattgagagttgctgttgttccgccagtagatgagatagtaacttttttaaataagaaagtaattcgtgataacgattcgaaaagtgcacattatgtacaattagcgattgaagatggttataaacgattaattcaatcttcaatcgaaagagaaattcgtaaagaattaacagaaacagctgaagaacaagcgatacatattttctctgagaacttacgtaacttattattacaacctccgatgaaagggaaagtcgtgctagcggtagatccggcatatagaactggttgtaaattgtctgtagtagatgatacggggaaagtactacatatcgatgttatttatccgcatccacctgttcgtaaatatgatgatgcaaaaacgaaagttctttctattatagataaatatcaagttgaaatgattgcaattggtaatgggacagcatctagagaaacagaagagtttatagtagatgtattacaaagtgtgaaccgagatgtcttttatattattgtaaatgaagcgggtgctagtgtatattcagcttctgatttagctcgtgaggaattcccaaatttacaagttgaagagagaagtgccgtttctattggaagacgtctgcaagatccacttgctgaacttgtgaaaattgatcctaaatcagttggggttggacaataccaacatgatgtatctcaaaagagactgaatgagtcattaacatttgtagtagaaacagctgttaaccaagttggggttaatgtaaatacggcttcggttgcattgttacaatatgtttcaggtttatcgaaaactgttgcgaaaaatattgtggcaaagagagaagaagatgggaaattcacgaagcgcacggaattaaagaaaatcccgcgtttaggtgcaaagacgtatgaacaatgtataggtttcttacgtatactagaaggagcgaatccattagatcgaacaggtattcatccagagcaatataagaatgttgaattgttattgaagagtctagggttatcgatagatgacgtaggacaaccgcaattacaaaagagattggaagaagtagagatttctaagttatctcaagaaacaggagttggggagccgacgttagttgatattatagatgcacttattagtccagaaagagatatgagggatgagttgcctaaaccacttctgaaaaaagggattttgaaattagaagatttaaaacgtggtatggaattagaaggaacagttcgtaacgttgttgattttggtgcttttgttgatgttggcgtaaagcaagatggtttagtacatatttctaaacttagcaaacagtttgtaaagcatccgttagatgttgtatcagtagggcaaattgtaaaagtatgggtagatgatattgatacaaaaaaaggacgcgttgcactatctatgttgccgattgaatagtaagagaagagagcagatgaaactgctcttttttttatggaataaaaagtgtaatggattatgagctttgatgtattttgctataataaaaccagcattcatttaataatttaatttgataccggtttttttcgaaatatgcacgttgcatttgtttttttagccacgtaggcataggaatccctccttgtttaatcctgctctcaaaaatctaaaatgctattgatgagaggttggtgagtggatttctattcatgttttgtttttagaaaccacgcttcttacatgaggatgggtatatgtactatttaatatatgtataagaagggagaaaagtgtaaaaatatttttttgtttaggaggaatgagagtggatgagcaagaaattcagcgactagtggaagaagtgtcactacaatactttgagatgccgttcttacataaagcagtgtttaacaatagattacgtacaactggtgggcgttatttattgaagagtcataatatcgaactgaattatcgatattacgaagtgtatggtgaagaagagttagtcgggattattaaacatgagctttgtcattatcacttacatattgcaggaagagggtataagcacagggacagggatttccgtgagttgttaaagaaagttgaggcaccacgtttttgtaaacaaatgattaatgaagagaaggaaaaaaagatttataagtatgaatgtatggagtgttcacttcaatatgtaagaaggcgtcaaataaatacaaaaagatatgtctgtggaaagtgtaaagggaaactcaaaccgatatcgaaaacatcttgacagtaaaaacgcaatccagtatattataaacatgtcacgtttgaacaagatgttgttaaaaacttcttgacttacagagagaatttttataagatacaaattgtcttcattattccgcagtagctcagtggtagagctatcggctgttaaccgatcggtcgtaggttcgagtcctacctgcggagccatacagagaagtacccaagtggctcaaggggctcccctgctaagggagtagatcgctaacgcggtgcgagggttcgaatcccttcttctctgccatacatattggcccgttggtcaagtggttaagacaccgccctttcacggcggtaacacgggtctgggtttcctccggttccgttgtctgttcccgttccgcctcctgggtttcctccagtttcgttatctttccctgttccgcctcctgggtttcctccagttccgttatctgttcccgttccgcctcctgggtttcctccagttccgttatctttccctgttccgcctccttggcttccttcattattgcctgttgtgttttccatttttttgataataggcgttttagcattgtgtactaacggcattatgccatactgtgatttatgaaccacattttccaccttgctattttccgtttgtgttcctttatcttctttgttaggtttttctttttcaggactagtttcttttttatgagtcccactcaattcccactgccacattacaggagagaaaacatctatattgatgtttggatcttttaacttcacatgcagatcaatctttatatccccttcattacgaggagctattgtaatttctcctgcttcgctttgaagaaaatcacttgtacgatcctcaccatcaatatgtaagaatcctgtacttccatctagtttaaattcttctggaatctttatcttcaaaatttgcggagattccattttaattactttcgcagtatcactaaatgtaattccctctgtataaagtctatcctttacttctttaatagcgtttcctaaagatattttatttacaggatcataataaaaattattttctttattatatttttttgtaaattgaattacattttgcagttgtaatttcgttgtatctggcaaatcactttgaccgatttcttccatgtttaaactaggtaatttcgcaattaaattctcgatttgtttctttattcgagcatctggttgtttcattaatgtatttatgaagatttcttgctttccatcattcgacatagattgctttaacttcttaattaccgtctcttgaatatcactttctaactttcctgcaagttctgtatcatattcagatacttgtttttttacatctgctaaatatttttgaatcgctgcagcatcagttaaaatattcggttctttctctgaaaacgtaaattgatttgaaataattttattagcggattccaatgcacttaattgctttaaagcatcgcctgtattcatatcattcatatattgattgaattgatttgtgaaattattcgctaacaaattgttatcagtttgcattttttgaaagttattaaaaccatctaagtacgtactgttagatttattcccttcatctaacgcttgaccgaaaccttttaaaacatcctgaaatcctttgaaactattaacagaaacacctgtataatcttgtactgttttaaattgatttgtgtaatttgctaacggactatgtatatcttttttatacatagttgtttgaacgtttcctttttcaattattttacctatattatcttgtgcaccttgtagcttaccgataatactcgcaaaataaacgtcgattatttgcttattgaaatcttctaaaataacagaagctgtattttctgcctcagctttcaaatccttattcccagttgcatttactttgtagtttaacgttaatttctctggaatctctgaatcaatcgcaactgccttcctagaaaaatcatttggaataacaatcatcatattgtaattattatttttcaatccattttccgctaccccgcggctaactacgtaccattcttgtttcgtatttttatttacatttttaacaaattgatctccaaacgctattttattgccctcaaatacagtgccctgatcttcatttaccaacgcaactgtcatttttggtgtagtattctcattagctttcttaacattttgatttaatgctaaataggagacccctgttgatagtacaagagctaaaataataaacaacaagatgctccatttgaactttttcactacttatcactcctgcgactgcgagtctatctaatgaaagacttcgtatcttactctagttttaaagtaatttagccatacaacgtatggttgcatggctaaattatatatttctgtttatctgtcttattgtagaccgaaattacgagaaagatcttcgtcatgtctagcaacagcttctgcagttttattaagctgcatattaatttcttgtaatagctgtgcgaagttttgtacttttggctttaattgattgaactgttggtcaaaaccttcgaaagcacgaccttcccattctcctcttaattcattttgtaagttttgtagttgacgtaaaatgtcctcaatttgatttgcactttgtccatatcgagtcgctttcgatttaagctcctctggtgacatacgaatttgtcctgccattattaaatcccccttaaaattaaaaaatagtaaaattaaccaataatcaattctacaaattgattatatcaataatttaaaaatttctaaacaaaaaaatgatatttttccaaaatttctcttttactataataacgatatattgtataatactaatttatttgttttttaagcacactctataaatctactataaaataaaggcaaaccatctattttatacttattcgctttaaattccagcgataaagtagccactaaatcattattttctcttctctcattcagactattctactcacttcaaagtcataattacctgcctttcaacaaacccaaactcttcgtacatcttttttgcaaaattcccagtaaatacattcaacctaatttctgaatattcctcctttaattccttaataccagcttccatcagttcacgcgataatcctctcccgcgatattctgggaaaacgtacaattcatatataaatccaagtttttcacgagaaaaatagtctgtattttcccctattaatatccatcccattactttatttgcttctttaatgattaaataatacgctcctttttctacaatcggctttgtaatttcaatcgctttctctgtacttaattgacaatttcctctcgtcccttcaaaaagcgattgagccgtatattttaatatttcattggtatcttcttgattcgccttaattatcatttttcacaactccccttgaataataggcattactatcgcttgttcaagattctccgcttccataacaattgccgttaatccttgttctgtacttgtttcatgaagctctcccttctcccaaaacacagcttgtcccgcctctacctttatcttttttttatttgccccacatacatatcctgctccgtccacaataagaagcagttgagatacaactgcttcatgattaccgatgattccattctcgtgtaaatgcatagcaccgatatgtatattccctctatggtttactattttcgacatgatgaaattagattgaaatactgataggtgctttcctactttttcactaaaatcaaaaattttcattgctagtcctccttatacatataaaaccatccttactgtctgcatcatatgtccttcaaagtcttcttcaaattgctctaattcagcaaaacctttcgcttcataaaagcgttttcctttttcatttgctgcttctacatgtatgtacaatttacgtatcccatttaattccttaatccctctttgtaataaagcacttccaatcccttttccttgctgatctggtaacaaataaatcgcacctaattccgcttcattttgtagtctaacaggtgaaaagttcgcaaaccctattacttctccttcttcttccgcaacgaataaatgcgtatttttaagacgatatttcattttttcatcagaatatgcctcgtctaaaaaactgtcttgaatttctcttggaataatgccttcatatgtatcatgccaagctatttttgctactgattgtacagcatgaatgtcttcttgcttcatttctctaattatatatgtcatctcgatgtctccattctctttaaattatattctgctaatatactagaagaaacggcaaaaccattttcataattcaccttaattaattttaatttctcaattgaagctgttgcaaaatcaaactttccataaatatattccattacacttaaaaactgctttgtatgtaatctatttgcaattgtacaatgcggaacccattttcccggtacgtaatatgaattggggttgtcatgaaaagttttaaaataatcatgataagaataatgaagttttaacaattcatcggtaacggtcggcgctagaaagaccgttccattagtaggaaaaattccaacagaaagaaaagttactgcgtccatattttcttgaatagctacaaactcccctagtttctcagtatacaaatgaacatctaactcattataatccgcaatcgttatatgaggttctactccagctagttgatttgttccaattacatttgttaattcattttgcagttctgtaattttattagtaaacacacgatcaaatgtagcaataatagcgtacaatctttctcaccccttcgttacacatagcgcttcccattcttcacgaatcatgcccattcgaatagaatcatagtatgttccgttataataacgacactttcgcattctaccttctaagctcattcctattttctccgctactttcatcattcgttcattaccagaccaagtcgtgattcctactctaccaatctccattttttcaaatagcaaatctctatataatgtcaatgtttctgtaccgtatccaccattccagtatgttgggtcataaatcacaagccccatctctaaccaacgcgtcggtttgtattcccaataaaacccaactgtcccaatgatttgaccgttattttctataattaaattggatagcggttcttcttttaaacgagtttgcatcttttccttataggatgagtattcttgcattgaaaacggaaaatacggtgcatcccattttttccattctggattttcttctttaaacacgagattccataatgtttttatatctgattcttcaattgtacgaattgttactttatccccttttactattacgctattcataatttcctcctacactcctctttatttcatatataattataatattttttctgaaaaatcaaaacaaatatcatttattatattgtataattttgttataaggtacgaattattcatgtagaaagctggtgattcaatgaataaacgatttagtattgctttatttcttactattgttacgacaaatattattctctatttcttcttaccattaagtattgttacgaaatgggactttaatggaacgcctacatcaacaatggataaaaccacttttgtaatcgtaaatataattatatgttccttcttattctttgtatttttagctttatctaaagcagcgagtaaccagaaatttctccattggatcggcaacacaatgttactattcttattttttgtcgatattgtcatcgccctcatcgctcttggcttttcacttcctcttgatcatttcatatttttagcattagggcttttatttatattaataggttatttcagttccaaaattgatacgactaaatcaaccgtttcattagaatggaatgataagcaccttgaaaaaagagcttcaaatattagtagtatttcaatgatgatagcaggtatttttttagcgatacttccttttatcgtttctgctccctatagaggttatgctatactagcaattcttttaggaatgacgcttatcattctgccaagtacgatttatttacttattaaagacagcaagcaatctactcctttaaaaaaataggaggttatatccctcctatttcagcttaatgttttatttttcactttttctatctcaactaaaatccctttctctatccaaccctctacgccatcttttttaattaaatcatatcctgaacagctatcatcaatgagagaaacgatatctcccttcctaacgcttatttgcgcacaagaaatatcggttttcactgtatattcacctgacttaagttgtttcatatattcattttttacagtgagcacattattcgtttccttttgtttacatacggtgtaatcttgcatcttctcgataggctctatgtaataatacggatatgtcactccgccctgcatttctgaattcgcattaaaatccgctattacttcgtactctggaaaatagtctacatatgtataagaaaacgtatcgcccgtttgtttcctctgaataataaatacgtttaattgccctgcttctttaattgcatttcctccatcaattgcaataatttctttctccttatcaataactggattattagacggtgcttcttcagaatagttcacgacaggccaatgaccgactattacatacttatttgctttatgtgattgattgaaaaactccggcattgctatcgcatttttgcgctcagtttctttccaatctactctatcttctagaccggcatgcacaaaaatataatcttctgtttcaatcgctgttggcaactctgttagccaatatagttcttgtgaaaattcacttaacaatgcttctttcacttcacgaattgaagtgccctcatgaactgaaaaaaccaattgctctagccattcattaaaaattgaatgcttcctcgtacataaataattaataagaccaggattttcatttagaagagcatcaactaaaacttcacaattcccttcaacaacgtgaacctttgaattgttctttacaagattcataacgtagtttactacgcctacgctatctcgtcctttctcgcaaagatctccattaataattaaataatcttcatctttaaagttaactttatgtagtgcttcttttaaaagatttaattctccatgaatatcagatatgacaataactctagcatcattagggattgatagtttctttatttttttcaagtataagcgctccaatcatcctctttattaaattaaaacaattcgacaaaatacactatataaccttttcaagtacatataccataacttacaacctatttacggttcaataataacttaaaaaataagaagaagctgttcccaacttttgcaggacagcttcttcttattttttataattctttataaaaagaataactcaccttatcatacccttctctttcataaaaacgatgagcatcaattcttgaaaatgctgacgtgaggacgatagactcacatccgttttcctttccccagttctctatatacgaaagtaatactttcccatgtccttttgaacgatgtgcttctgctgttacaaggtcatatacgaaaacgtgtttcttattataaaagttcgtacaaatcgctacacctgcaaggctaacaacttcatcattctcattacgcagcgaaaatagtttataattttcttctttcatatttcgaaataaagagcttgtttcctcttttgaaagtttcattcgtaattgctgtaaaacaggtaatacttcatgtaattgctcttctgttactacttctttaacattcatttttaactctcctctaactatttatttaattttctaaatgttatatcattattatagaaagtaactgcccttcacttaagtgacagtttaagtgttttttataaggccagttttaaaggagagttttatatggattttactatcccattgcaattacaaagtaacacacctatttacttgcaaatttacgaatatataaaagctgaaattatacaagggactatttctgtcggcacacgtctaccctcacacagaaatttagcatcacaacttaatattagccgcattactgttgaatcagcttatcaacaattattagctgaaggttatgtagaaagtaaaccgaaacgtggtatttttgtagcaaatttcgatattgacgttatcccaaataaaaagccaaatgcagcaaagaagacgagcaatttgatagacgaaaaatttgaatatgattgtagccaaggacttattgatcaaaatgcatttccgattacaaattggaaacgagcattacaagaatccatacttacatacgaaaatgcactatttgccaaagaagaccctcaaggtgaattcgctcttcgagaacatatatcaacatatttatatcattctcgcggtgtccattcttcacctgatcaaattgtgattggcgccggaacgcagccacttctctggctactacttcaactgcttggccctacaaaagaatacggcattgaaaaccctggatttcaccgtatacacgcaatcattaaaagctgtgatagacaaattcatcccataccattggatgaaaaaggtattgatatttctagtttatacaatacaaattccaatgtcgcatacgttacaccatcacaccaatttccactcgggattattatgcctttatctagaagattagaattgttaaagtgggctaatggttgcagcggatacattattgaagatgactatgacggagagtttcgctacgctggtaagccgattccttctttacaaagtcttgattcaaatgaacgcgttatttatatgggaactttctcaaaatcttttttaccttctttacgaatgggatatgttgttttaccaccacaccttttaaaaacatatcaagaactgcatggaattttcaaacaaacagtcgctacaatacaacaacttgcttttgctaactttatacaaagcgggaattgggaacgtcaccttaatcggagtcgtacactatataaaagaaaacatcatgcgttagtaaaatccattatgaaagaaatgggggctaatgttcaaattcttggcgaacagtccggacttcatattgttttatgtgtccataacagtatgaatgaaaatgaactgattgaatccgctaaaaaacaaagcgttaaattatacccactttctccatatgatttcgtgaatgatttacgtaaggaatcatacgtattactcggctttggtagtattccagaaaataaaattgaaacgttggctagattattaaaagacgcttggtttcctagttgcaaggaaactttttaacagtggatttaacttgtaacatgttaacaattcaacaaaataaaaaagaaggctgttccaaaataactttttggacagccttcttctagttattcacctgacctagctttccttcccggacgtttcacaccagtcgtttctgttgaataggaagcttcgattatagcggctggatctacagagagaacgagatctttcattttcggataaatgaatcggtttgtaatgcaataaatgattctcttatgctcccctaaaaaaccaccttctccatgtagatacgtaacagatagttgcaattctttcataagtaaatcgcctatttctttattcttaccagaaataatcataacgctcttaccttgattaataccatctaatataaaatcaatcatcttcgtaacaatatagaaaattgctaatgagaacatcgcttgttcgattgaaaataaaatggcaacaaagatgaaaataactgcatttactgcaagtaaaaatgtactaatcggtacattaaagtgtttattcatccaaactgctaacatttccgaaccgtcaattgctccacccattttaacaacaatcccaacaccaattccaaacagtactccaccataaagtacaattaataactcagaagtcgtaattgctggaaatggttttaaataaattaatccgagtgttgtaactacattcgcataagatgtacggataaaaaatttctttcccattacttttgcagtaaataataaaattgggatattaattcctaagaacacaccataaagcggcaatcctgcgactttatttgccataatagcaatagccgttaccccgccatctactaatccattaggtgctaaaataagctctaatgaacctgctactataattgagccaattgttaataatacgtattcaaatactttcttcattcattacccccaaaacttatatattttcttagtattattttaacgtaattttactactaattcaaaggtatcgatttatatacacaaaagtttctcctttatcgctatttttatgtaacacatgtaacgcgtaatactaaaaacacacttacaaattaaaagtaagtgtgtttttaacatctatttaatctttacgtacggcttcatttttaatttgaatatttcctcaactgccctttgatatccaccggcatttctaagcgactctcccactttacgactattctccttaaacgtcacatcatccattactttctttacagtctcacgtaacaattcagaagttaactcgttgcgattaagtcttattcctgcccctacttcagtcaatcgttttgcaacgaatggctgatctcctgttaccggaattacaactaatggaacaccgtaatataacgcttcactcgaactattcataccaccatgtgtcacgaatacatcagcatgctgtaaaacttctaattgcgggacataattatacaacttaaagtttttcgggatattttcaaattgacttatatttatcttcttaccaacgactaatacgactgtcgcatcaacatctttaaacgcttcaaaacatttttcatacaaagcaggttgttcattaaaaactgttcccatagaaatgaaaatcactttttcattttttaaatcttcggtaggaaaactccccacttcttttcgagtagcaattgatggacctacaaatttatacgattcatcaaatacctctgaacgtggctgatattcttttgaagtatatacaatcgtaatatcaccaggatggttcataatatcatacatactattacatttcattccatactgcttattccatctttccattcccgctaaacaagattgatataatggatccatttcatctacttgtctcgcttcttgctcatcatgaaaattaatgtactgattaacagcaaacgttgtacaggatgaaacgcttggtaattgtaaaatattcgctataatacgtcctactggaaaatgattatcatatattaaataatcatatttttcctcttttgtttcttctacaatttgagtaacaatacgctctgatgcttcaatcatatgagatagcatcgtcaaagggctcccaccttcatttactcgttccataatattaatttgagagagaaaattctcaaacactcggaattccgcacctgttgcttcaaccttctttctataatcttcaatacaataagaaacaactgtttcccctcgctgaattaactcacttacaacagctaaagtcggattaatatgaccttccccaggaaaatttattacgagtacatttgccataacattctctcctatccaattaatataataaaattaacaattaattatattaattaatttaagtctattataaatgaatgcattctacttcttcatgcttttctcttcattttattattgagaaatattttctatagtctacattattgtgattcacaatcttataaatgaatgcttaattttacttttactcttcatagatttaaagatacgagtcttacattcaagtattaccaccattatttttagacaattcatacaaaaatagagaaatataatatttttaatgaattttcactataaatgtaagtatgctttcaatctttttatctttatcctcataacacatcatctgttatataatgaatttatagaatttacagaaaaataagcacatgcctttaaaagtggttacgaattatgtctattcctcacttagaagaatatagacagccttatcgttatttataccgactgttatctgtgcaaggtaatgtggaattaaaaaaatggttaagtcacccatcctatttttaaatacgaatgagagggaatatacaatggatattcagaaaaagcgttctgtaacagaaagtgaaatacagcaaatgaaggatttggcttatatttgtgggcaacaagacaatcttgattactcttcagatttacatatcaactttttaaaaaatcgaaatgaagattatataaacgattttcttctttataacggtactcaattaattggcgctttaaatatgtatgatttcgaaagaccaacaaagcttgaactaataggctttgtacatcctcattttagaaaacaacgcttcggaactatccttttacaaactgcaatgaaagaaatacaaaatagggagacagatgaagctcttcttattattaatggggattctatttctgggaatgaatttgtaaaacatatgaagttaccatatttatatagtgaatatagtatggagtgcaaaacaaacgaaattcaaaaaacaacagataataatatacagcttactcttgcaccttcagaatcacttcttgatcttattaaaatttctagtaaagcttttggtgattcagtagaaaatacgactacatggttacaaaaaatgatgaattcatcttcccatcaagtttacagtgcccttattgctgaaaaagtgataggaacaattacagtttctaaacaagagcaatctactacactatcaggattcgccgttcatccttcttatcaaggtaaaggatacggaaaagatattctttgtaatatagtacatacccttattacagaaggagtttcaacaattgaattagacgtcgaaacgaaaaatatccacgctttaaaactatatacacaatgtggttttgaaattaacacgaggcatgactattataatttaattaatttttaggtgaatacatatgttaaaaaaacaatttattctaattatgatattttagcagacatctataataaacattggggacattttgttgaatactcccatccagcctcgttttacaagatgctcttccctactctcgtatattagatctttgttgcgggactggtcatctctgccggtgatagtttaatttagttgaactaaaaagtgtgtttcacaaagtttactccgtattacataacgagggtatattcgcatttgatatgaataaaaaaataaaaaaactgaatcgaaatgattcagttttttcttaatatatttacaactgcagttgtttcgtcattttctttatagacacgcggaattcttctatctagcatacatgtaacttcatagtttattgtacctaacatatccgctatttcttctactgcgatattttcttcaccttgtttaccgtagaatactacttcgtctcctacttgtactggcatcgcttttgaaacatccaacattaactgatccatacaaacacggccaataacaggtactcgaaccccattaattaacgcatagcctttattagataattgacgattataaccatcagcataaccaattggtacagtcgcaatccattcttcaccagttgttacatacgtattcccataacttacaccacgattcttcttcgcatgtttaatatgagctacttttgattttaacgacaacgcaggctgtaaagaaacgactgaatgatccacttcttttgatggatacataccgtacactcctattccaacgcgtaccatattttgaaatgtgttacttaattccattgatcccgcactatttgaactatgaatatatggtatttgaattcctaattctttcgctgtattaacagctttttcaaataaacttgtttgcatattcgtatatgatttatcgatttcatctgccgtagagtaatgcgtaaacatccctactacctctacatactccatacggtttaattcttctaaaaatggtttaacttcttcttcttgtaaaccgatacgactcattcctgtatcaattttcacttgaatttgtactttcttttgaagacggtttgcaatttcatttataccatgtaaatcttctactctataaacagtcatcataacgtcatattgaattacatcttctacagccgctactggtgtgtatcctaaaattaaaattggtacagtaattcctgcttctcttaattctattgcttcatctacaaatgcaactgcaagttgatgtattcccgcttcaattgcagctttggcaacttcaactgccccatggccatacccattcgcttttacagcagccatcatcttaatttcttcatcatttacatgttttttaaattcttttacattatgttttacagcatttaagtcaatttctacaattgtatctcttccatatttcaaactcattggtctaactcctaactcaataattgcattccattctatttcacgtttcatatgaccttttacaatataatacttttcattatgctagtcaaactactagaattttcggaattttgagtatgatataatatcctcaagaaactattatatacggagacgaggagaattacaatgtttgttcaatctgcattgcatcaactaaaagttgctattgatacttctatttatatgcttaaccaatatagtgaaaacgatttaaaaatacaaccgattcactcaaaacgatcattatttgaaatgtgtgcacatctttctcttatttgtcatgctgatttactcattttaaatggtatttcagaaaaagaattacataccttttatatagaacatacacccgtaacagttgctcacatgcaacaaacgatgattgaaggatacaaccttctctctaaaacatttctttcctactcccaaatagaattagcaaaagttatgactgcctattgggggatttcttattcgcgctttgaatggttacttgaaatcgttgcacacttttatcatcatcgtggacaaattcatattttattatgcgagcatatgaaagatcctcgcattcctttatttgagtgattttccactcattcattaattagctacaaaaccaataaaaagtatcattcctaataaaataaatgtttgagcataacctcctattttcataagataaatagaaatgataggtcctatactagtacctaaaaataaaataaaagtatattccccttgctttccctcctaattgacctccaagagaaactaaagacggaacggatatagcaatacctattacaaaacagacactcatcattacaagtagagatagatccgaaacaaagcccattgaacttagactaaaaataacaatcaacaatcctccttgaagaactttccttacttcaaacctctttgttaaaagacctgcaagtggtgacagcaacataccaaacagccctgctaagcgaaaataaaggatttgttctgcagttaaattgtaagtaggagagctcaaataattccctaaaacagtatacatattaacaaaagccattattaaaacaggatttttcacactgactaactattagttttaaataattcgcaacttctttaaggcataagaaattccgccttcactcgccttcgttgtaacgaaatcagcccttctcttcaactcctctccaccatttcccatcgcaactcctaatcctacatactgcaacatctcaatatcatttccaccatcgccaaaagcaatggcttctaatttactaatgtttaaatgttccaatactttttgaattgcagttagcttcgatactttactatcttccaatacatttataacgtaaccatgaaaacgctcaaacgtaagtgctggatatctttcaatgaatttttgagcttctgtatcatcagcatacagacatatgcaatacatctcatctgataagtttctaactttgtcaggataccgctctaaatttaaagtttcatttaacgctcgcatgacacgttcatctttggaagcaatattattcattgcaaattcttctgtaaagtaagaaacactgtgaccatctattatgtataaaactttaatttcttaaaactgcacaaaatggctatattacgcagttttgtactgcatctaattttataaatggcaacatatttctggtcatttgtgaccaaattcgttaccgaaataattcaaaattaaactaataaaaaataaaagagcacagcgtgtataaagagtgcgtcaacaccctttataccgtccgcctacaccaactaggcaaacacttgctgtaactctttatgtactttattttaccgtacgtaagggttcttccgcaacagtttgcttacattttgtggcatactgttgcttttttattttcaaaggagacgagcccttatgaaaaagaaacaagccatcaccattcttgctagtatagaaacatatgaaaacttagtatcttttcaaaatctcaaggagctaaatgacactgtacgcgcatataaagaacaatttgctgatcgattaaataaaaatcaattggctgtactcaatcacttacacacccattcttgtaaatattttggcgtttcttttaaatccaaaaagaagattgctgaagtacttcatattagccgcagaacagttattcgtgcatgccaacacttagaatcacttggtatcatcaaacaactagaaatgaaacgtaaaagtgatatgagacaaacaagtaacattattgtaatccaaccaatcttcacaaaagacgagtttgtcacagaagcccctactaaaactgtggaaatttgtcacaccaagaaaacaactactaaaaccttaaaacaaaagataaaagatataaataaacgtaaggtagattcagctgacacaacacctgaaaagaatgtacaacaagcaaattttattgcacactgggttccagaacgttttgcttctctagcctctgcttattattcaaaagcgagaactattcaagaattttggaaagtagtaaaacagtgtaattgtgtagtaaatcatacaacaggggaaactgcttttgataaagaacaagaattacatattggtgtacaggccatgaaagaatttgtgatgaaaataaaagatggagcccgcatgaaaaaaggatggttctcctatttcaatggtatcgtaaacaacttgatgaacaaatattattttgaccccgaatttggtatgtgatatcttcttttacacttcaggtaccacatatacctttgcatatacactatgctgcacagcaaattgttctagcgtcttttgcctatatggtgtgattgtaaagaagtgaacaataggaactttcccgttatatttatttttataatacaaggtgaattcaccatacttattcattttttcgctgttcacattcatcatttgtgtacgatctatttcaactgcgtttaaaatcccgtcactatcacggtactttacatctggaataatcgttctcttattttcatgcactttataacgtataggggcttctatctgccaatcttcaggacaaaatagatacaaccacgcttcgttcctcataaggctgtgtgctaatcgaatggtaggtacaaccttttctgtatcatcgaatagcgcacgtccttgtttattgaggtaatatacatgctcttttttataaacggtactattcacatatggacttaaatcttttaaaattcgatttgcatttcgaattcctcccatatcgtgaattgccattaagtgtcttcttgtcgcaaattttagctttctaatcgaggtcaaaatcatcatctgacgattcattttgatatgtgtctgcatatgcatcttttttcacctcgtattgttttaatacgtcccacatttgttcatttgagatataagggacttgaacttctgttaatcgatctgttttaaaaagcgcacgccccggtatactttcaatcaattcgagaccagtttcatcgatgacaacttgagaagccgtttgagttggtaaccgaaatcctaattttgcatcactgttttgtttgacttgacgtggtaaagtatcgccagtagggtattgcgtgcaaaaaatcaatcgaaatcctaatgctccaccaattcgcgctatatgagaaagcatctgttgacaagctcctaataacttttgttgttcccgattcatacttttatcaggacaaagttctgccccttcatccacgataataaagtagcgttctcttatatttgtttccaccacattggtataatggtgttctttcataaaaagcattttttcttccatcttttttagaatcgcccttaatacctgaaaagcttccattggcttttctgcaatcgactcaatctgttttacatttttgtatggtccgaactctaatcctccttttaaatcaataataaacaagtgcgtatattctgcttgtgcagtaataagagatgtcatcacattctttagaaatacagtctttcccatacgtgttaaaccacctaatgtcatatgtggtgttttatcaaaatcgtgataaatcaattgttctaaactttgcccgattggcacaagccattttccaactttcattaaatttttcgaccattcccacttcttcggtatttcttgatcgaatacacgaatgttcaatctataattgtcatactgaattcgaacaggtttatttaacccttcacttacaacatcttcaacctttcgaataattttacttggcataccaacaggcaactcatacacgtatgttgtacttctatcatcatgagttcgtttcttaaattttggataatgaatcttatcatcttttttgattgcaattcctgacacttcaaaaaacacttgtatcttctttttatcatctattttccttttaaaccgatcacttacgaatgcaaaagttaaagctgtcatcgggacccatagtaattccaacataaacatttctcctttagatatcctataaggatatcattgcactttattggaagcgaacaggactagcatttttgcttgtgaggtctattgtccctctcttccacatcgtattccttcatagaaacataacgagaacgtaacgtagaagatataagaacgagcccgtaagcgttgtatacatagtcatacgtggaagccaatatggaacactcttccccattttttcagctacactcatcgcaactacagacaagcctgttgccgtccaaataataacgacttctcctgcaagtgtcatagccattcctcggtcaattcatctttctcacgaaatttaatccccgatttggtagctacaatctgataccgctccattaaatcttgccaattcaatatatcttcctcttctccatataaatcttcttcaattacttgtgataagctgaaatatcctttgtactctttgttatcaaatacttcatggttcctcatgtgagtaagaattgattccgtttcttttctagatctagattcgttatacatgtgacgtagttcttttgatgaatataaataaggcgttgtattgaggtaactatactgagaacgcatgtaaccctctcctctcttgatatctacaatgccatacggaagtccaagtagaattcttcgtgggcttccgtatggaagtaatataggtatatgaaccagaaggaggattattgcctgtacacctgaaatttattttttaagaggacaaaaatgatttcactagaatatacatactaggaggtggaataatgcttcaaagtaatttaaaacaaattgtagataaaaaaggcttgcgatatggatttatagcgaagaaagtaggtatagcaaactcaacaatgactaatttgctgcaaggcggaacaccgacacttttagtagcaattagaatagctaaggttcttgatatgcgtgttgaaaatatttggattgaaaaaaataaggaggatacataatgaaatttaagcttcgtgttattttatttttagcgactatttttttagcaatcattacctttttcgcattgactactagggatgataataaaatatctaaagatgaatttaaaaacatccatcaaggaatgtctatccaggaagttcgaaaaattattggcggtgatggagaagaaaataaattaactgatactattactgaaattacatataaatcaattgacggtataaccaacggagaggttaaattttcatttaaagatgataaattattttctattggagattttgcctacgcttcatctgaaagtaaaacttatcaatctgatcaaaatcaaaactcaaataattccaatgaaagtctttccacaacaacacttcctacaaataataatttagaaaaaaggattaaggatattgtaaaatcgagcattggttcaaaatcattaacaaatttagaaatcaacaaaaatatggggacagcaactgaagatgataaaattgctatacttactatccacgcaagtgataaccttacagataatatgtttaagcaaggaatgtggatggacacacaaaaaatcttaaaaggtatagccaatgaaaaagaaataagtgagattgctttcttttggcaatttgaaacagttgatccatacggtactaagaaagttgataatgtgatgaaaataatttttaatcgcgaaacaattgataaaattaactttagtaattttatctttgaaaatatccctaaaacagcgaccacttattgggaacacccatctttaaaaaaagaataaattcaaacaaaaataagagccgtcaaatgacggcttttattttttataaaactattcttttgtagaaaatcacttcacatacacataggcttcatttgttgttacatagtatgttttgcctttactattgtgaactttatattgtggtgaaccatttacatttacttttgcatcaattgtaaatcctaatcctgcatctacagaaccagccacatctttatcctgccaagatggagcatcatagaatcgtaggttattaactttagaaacaacacgcttacctacaatagaagaatccactgtactctttttattaaacttcacataagatgggtcgttcttaatccactgctctccaccaagatttaaccaaccatccttttcagcccatacaacataagattctggtttgtttaattgacgaatcttagaatagcttgtacccggtccttttcgtaagttaacgttgtaaccttcaatataagcaataccgtctgttacagctgttggtacttctgctggtttagatggtttttcaggtacagaaacatcaacactagaattgttataagctcgttgtacatcagcacggaattgagcttctgatacgccatgagactttaagtaatcaagtggatcttcatgatctgttccgccaagatatttcgtcacatcgtagtgagtccataatcctttttccacagataaaccacgatcacgtaggattttagcaagtaacttcacatatttatcataactgcgtttgaatttatcgtaatctgctgtttcgcaaagttcaacatgtacaaagcgtttatttgctcctggtccaccaccataagcaatatactttgtatcagcaatttggattgtttcattccagtcaactgcatagtgaacaaatgcgtttctccatgtacgagactcatatttttgaatattgatagctggtgcttctggagtcgccgtagaatgagctacaactccctcataagcgccaacaccgtaacgatatggctgtttaggtaaatctggaataataagtgttctatcagcaaaagcgcttgttgcaatggataaaactaaaataaccgcaaagattacagaagaaatatgttttaatgtctttttcatttttcatcaccattccccatgattttttgtttaatatctgatacatcttttgaaagtgaaccaaatgcttttgcctgttcttcgatgaccgcttggtttttttcaatcactttttggtactgctcttcacgctgctcattctttttttgcgtagtaaaaagcatccacacgaataacgctgcgaatgctccttgttgaaccattgaattaaaaattgcatcctccactgttctcatctcctcgtatgattaagttaggtttttagggacgggatgtacctataaatccaaggggttcaatccttagtagctgcttaatatatttgtctaattttttgggttcagttcataaaatcagtggtcttttaaatgattaagcagctttctgttcagtttgaggaacaggtttttgaagcgagttataaactcctgttccgataacgtctaatgccattctcattcgttcaggtgaaatgttttctaatacgttatcttgaggtgtatggtataccttctcaatatgatagattaatggattccaactatcgacacccatccaaatgaatagagcagcaggaataccagcttcagcaaatggaacatgatcactagaaccgaatttaccttgtaggatgaggttattatttagttgtttacctgcttgcaaggcagcgtctgttacaaagtttgtagagccatcagatgtcatagcatataaattctttgctttatcataatttgttgcaaccatgtcggcgttaaagacacctaaaatacggtcgcgttctttttgggatagactattcacgtaataatccgaaccaagtaatccagtttcttcagaaccaaaggtaataaagcgaatttctttatcagtttctacattttgaaaagcacgagctagttctaatactaatccagttccagaagcattatcatttgcgccaggtgctccgacaacactatcatagtgcgagcttacaacgactgctttttcattacctgtactcttttttggtttctttttggcgataacatttagagatgttaatttagattcatgtctcgcttttagggaaagaattgttgtcccctttttagcgatttcttctttaaatgcatttccttgcgcataagcaagaccaaagacagggatagattgctttttcattaggtggggattgaaggtttgtccataatttccgcgtccgccaattaaactgtataaaagaacaccttttgcacctttgctaacagcattttcaacttgtttattatagtcggtaactgtcgttcctctttcaaataaaacaattttaccgtttacttcatttggaatatcttctaattttgtcccaccttgaacaaagataaggggagctgtaacagcttctgtagaaattagtgcattaggagcggcaccagcttgccaattacgttttgttgataggggtgattcaatgaatccaacgtattgatcgggcacctgaaatggttgatattctacgtcatagcccattgatttaagctgcataccaatgtaacgagaagcccattcttcggattttgttccaccggggcgaggaccaattgtttcagataagaaacgaacatgttcaatcgcgcggtttggatcaatctgttttgtaatagatggagtttgtgtaacctctgacgtggaatccgcttttgcttgcccaattggagctaagctaacagcaagtgatacagcaagcaaagagcttactattttttgtttcaataattttctcattttttcctctcctattcttctattctctctgactgacaaaagaagacggataatgactttattttaccttcacaccttttatttttcaatattctgacattgataaataaaaaaacgatatatgcatatttgcatatttttgagggagatatgtatgctatcattttaaacgaaggttcgctttctactctgaaagctcctacattgcatgaatctagtgtacccaaactttagattatgtagaggaatggaaccactgtagggtttcatttctcatgtttgaatcagttgatggtaattatgtttccgcatttcataattattatcagtgatatatgtaaggcatccatatgaaaataagaggctgttcaaaggttttccgtacttttgggcagcctcaccccgttaaaaggacgatactttatgtatcgtcctttttgtataaaaaaacatccaatcaattgagagattgattggatgtgaaaaaattattaataattttttttgcgttttgtagctaaaatacttaataatccagctagtagaagaacaatacctactgtttgtgtagggtcttctttatgacctgtatttggaaggtgcttatccgtatttcgatcatcttgctgtttgttatctgttttattcgatgtttcttcggaagttccgttttcgtgtttctcagatgtttcattgcctttgttatcttctttatttggaggagtaattggcttgtcatctccacctgaagaagattcaatttttttatttgaaactgtaatttgtagtggcttagcttgggctttatcaattgtaaagtttattggtgatgcatctaattgatagcctttaggagcctttgtttctactaattgataattaccaggtttcaaatcatttacgattacttttccgtgttgatctgtttttaaaccttctcggatgacttttccatcttggtctaaaatattgaaaatggcaccttcaagtgttccatggtgatcaatatcaactttagttaactcaattgaacctgttgttaaactatttaaggctgtaacagaggtaacctgagattgtcctttcgtaattgtgaaaggaattggtttaacgtttaaatcatagccagttggagctttcgtttcaatgaactgataatctcccggacgtaaatcagaaactgaaatcttcccatctttatcagtagttaaatcagtgcgaacaattttacctttcgcatcgatgatgttaaacactgcatcagaaagttttgtatctggatttatatcatccacttttattaattctacagcaccctcagttaagctatttgtagcagtaacttggagcttttctttttggcttttcttaattgtaaacttaataggtgtactatctaatttatagtgttcaggagctttcgtttcaataaactgatagtccccaggacgtaaatcagaaacagaaatttttccatgtacatctgttgtaagctcagtgccaatgtcgttaccattcatatcagtaattttaaatatcgcacctttaagagcagtaccatctacatcatctactttagaaagttccacagtgcctttcgttaagctatttgtagctgtaacggagataggatcagcttggctctttgtgattgtgaatggaattggctctttgtttaaatcatagtgtttcggagccgttgtctcgatgaattgataatcaccaggacgtaggtcagaaacgctaattttaccttgttgattcgtaacaagatctttgcgaattacagtgccattcatatccacaattttaaatactgcgccttcaagagtagtgccatcgacgtcatccactttagaaagttccacgccgccttttgttaaactatttttcatagtaacggtagcaatatctttttggcttttttcaattgtaaatataattggttttttgtctaaatcatagtgttcaggagccgttatttcaacgaattgatacgtaccaggacgtaaattttcgataacgattttaccttcactgtttgtttttaaatctgttttaagtactttgccatcttgatctagtaaattaaataccgcatcggcaagttttgtttgagtgtttaaatcatcaactttaagtaattcgatactaccttgttttaagctatttgtagcagttaaagaaataactttcttctgtcctttttcaatagtgaatttgattggtgtttcatctaaaacgtaatgcttaggagctttcgtttcgatgaattggtaatcaccaggacgtaggtcgttaatttcgattattccttgttcatttgtaacaaggtctttatgaactacatcaccgttcatattaacaattttaaatactgcatctttaagaacagtgccatcaatatcgtctactttagaaagtttaactgcaccctttgttagagcatttgtagcagtgatatgaagagtttcagtttggctctttttaattgtaaatacgataggttttttatctaaatcgtaatgttcaggagcaattgtttcaacgaattgatacgtaccaggacgtagattttcaacaacaattttaccttcagcatttgtttttaagccttcttcaactagctcaccgtctgcatctaataaattaaatacggcgttagaaagttttgtatttatatcaatatcgtcaatctttgttagttcaacgctaccttttttcaaagcatttttgcctgtaacattgatctctttcgtttgacttctttcaattgtaaatggaatcgttgtttcatctaatacatagtgctcaggagcttttgtttcaatgaactgatagtctccagggcgtaaatcagaaacagaaatttttccgtttttatctgtaacaagattcgtatgaacttccttaccattcatatccacaatcttaaagattgcaccttcgagcatcgtacgatcgatgtcatcaatttttgttaatgttactgcacctttctttaaaccgttagtagcggtaacagtaatattctctttttgacttttttcgatagtgaacggaatagggtctttgcttaaggtatagtcttttggagcttttacttcaataaattgatagtctccaggacgtaaatcagaagcagtaattttaccgtttttatcagtcgttaaaccttttcgaattacctttttagtatcatgagcgtcaacgattataaattctgcaccttcaagagtagtgccatcaacatcatcaacttttgttaaagtgacgccacctgtaagtaaactattttttacagtaacagggataggaagatcttccttactaccttttttaattgtgaacttaataggtgttttgtctaatttataatgttcaggggcttttgtttcgataaattgataatcccctggtgctaaatcaggaataactaatactccgtgatcatctgttgttaaatctttcataatttctttgccagttgcgtcttgcaatgtgaatacagcgccggcaagagctttactactttccacatcatcttctttaataagtttaacttttcctttcgttaaactatttttaaatgtaagtggaaggagtttttgttgtcctttttcgattgtaaattcaattggttctacatttacatcgtaataagttggagcctttgtttcgataagttcatagttaccaggacgtaagtcatctacaactagcattcctttactattcgtaacaaggtccgtacgaacatcttcattagtatctctattaacgattttaaatactgcaccttcaagtgtttccttttcatctgcagcattcacttttgttaattcaataccgccttttgttaagctgtttttagcggtaacagtagcctgagttgtttgactttctgtaatcgtaaatttaattggttttgtatttttgtcgtaatacttcggtgctgttacttcgataaatttataatcgccagggcgtaagccagtagcgatagctttaccatccgcaccagtttttacattttcgcgaatgactttcttttcatcattagcatcaacaattttaaatacagcaccttcaagagctgtaccatcgatatcatcaacttttgttaattcaacatctcctggttttaaagcattttcagctttcacaagtagagtttctttctgacttctatcgattgtaaatttaataggttctgctcgtaaaacgtaatgttcaggagcagctatttcaataaatttatacgtaccaggacgtaggttactaactttaactttaccgtttttatcagtagttaagttagtgtaaggggaaacgtcattattatttgtatcgacaagcttgaatactgcaccttcaagtggttttttctcaccaaactcatcaacttttaataattcaacttcgcccgtttttaagctgttatttgccgtaacagtagcaagagcttgttggcttttatcaattgtaaactcgatagggtttgtacttaacgtataatccttaggagcttctgtttcgataaatttataaacaccaggctctagatctttaacggtaacttttccatctgaacctgtttttatattttcacgaattacttgtttctcgtcattcgcatcgacaattttaaatacagcaccttcaagggcagtgccatcgacatcatcgactttcgttaaagtgacaccacctttaatgaggtgatttgtcgcggtaacagtaagtgctttctgttggcttttatcaattgtaaatttaagcggttttttatctatttcataattttcaggtgctttctcttcaacaaattggtactctccaggaagtaaatttttcgcttcgatttgtccgttaccatttgtcgttaatttggtataaccaggaattcttttgttattttggtcccgtacactaaatacagcaccttctaaagtattaccctctttatcaacttttgttaggatagctgagcctctaattaagctgttttgggccgttttattaattactgttgtttgatcttcctcgattgtaaattcaataagtcgatcatctaattgataatgctcaggagcctttatttcttttaagtagtatgttcctggttttaaattatctacagtaatttgtcctttatcatttgttgttaatttttcgtgttctgaaattattttttggtctttatcaagtagtgtgaaaacggcaccttgcagtgtgacgtttttattcaggtcatcagactttgttaaaactactttaccgacaaacttcttatttgcaagtttatatgttgtagtctcttgtgtaccaagttcaacaattttcccttgttttaaatcccagctaattacatagccttcaggagcctttgtttcttttaataaatacttatcgcgttttaaattattaaatttagcgataccgtctttgtctgttgtaattttacggataacagttttacctgtacgatcgtataaagtaaattctgccccagctaatagtgcgtttttattgtcgttatctacctttataatttcaaggtttccacggcctttagtagcagatcctccgcctgaaccagaagacattctcacttcaatcgtttcagtagtttctgtgtttttaactgtcaacttattgcctgtgattttcgctttattacttactttttctttatcgtctgcattaataagtgagcgatattctaaaatataagctcgatcaatttttttcaagaaggcaatttcgaaatgttgttttccggtattattgtctgttgttattttgagtttatagtctgttccttcttttaattcgtttactgtatcttttgttaaatttccatatggatcaacagttgtaggatataagtggaatgaatcttccacaattacctgattttcggttgggtcatctgttacaacggcatctgcaatggttgattggctttcgttaattgcgatactccaattaatatagttgtcgtcttgcacagcttttttagtaacgaagctgccacctttatttacttgagtgtcacctgtaagggtgtttacgattttagagccatcttttaaatctgcctcgtttttgtaggtgccttggataagttcaccatcaaggcttgttttaaagataatatagtaaggtgaattaattgattgtttgaaatgaacctttagggtgtttttattgttctctgtaggttcttcaagttcatatttctcagttggtacagcattaccaggttgtgcattatcaggatttccatttaaaatcatatcgcgcacttcaatggatccaggcactaacttttgtttatcttgtatgacgtctataacataaggatctttaatctcaacattattatagttaaagcctattatccaagtaatttccttcgtttgggcgttataagaaccgtatttataaccatttgcctttgtgaaagtatcagaatcgaaattagcttcaactttatttgattgtggattagaatccgtatctatccaagaaaggttacctgtatttttaaatgaagttttaccactttctagctttgtataatcaaagtctgtcgtatattttacgactaatgtctttgtcatattagactgatacgtacctataagagtaattttgaagcctttatctgttacatctaaaacatagtcagtcccagcttgaagggtataatttccgtctttaatttctagtttcttatcttttaattgtaatccaccatgatcaaaggtgtccgtaataatcgcgttgtttaatggatagttgttattatttactataattgtccaagttgttgttttgtctttataatttgtttcagctttattattagatttaataatattttgctgcttgaagctagcttcattttctttacttgaatcattatcagctgtaactttattttttacttttccatcttctataactttattagttggcttggttttataggtaatcacataagcactattaatatcatcattaaactgtaaatcgaatccattcttcttgttacttacagtgtaattattaacagcgtctcctgttacaagcgttcctttttcattatatgaagcgttttttacaacaatagaatttgcatctagttcgtgtgtatcgtcaaaaatatcttttaaaatcgcatctgcttttttgatctctctttgatcaccattgtaagtaattgtccactcaattgtttgcgtctttggatcatatttacttgttttatttaagtgtgtaccacgagaaaccgttacagtagagcttgcgttttgttgcttttgattatcactcgttatcgtaacgttatttcggaaacttttaatattttcatcagtaatttttgtggcatattcgatttgatatgctttattgatagaatctttgaaagcaatctccaattttgagccatctgatgaaataatattgtaatctgttggctcggcttctgcaccacgcgttacattcccattaacatcaacttctaaataataaactttaatagaatctttatttaagcttgtaccttgtggaatgttatctttaaaaacagcgtttttaagggtgtctttcgttttgttcatctctactttccaattaatttcatttgtattaattggtctatcaggtaaaccctttttattcgtagctgtttgtacattaggcttaaagtcaactgtaatagaaacatccttatctttaatcgggaaaggaatttcttgtgttgttgtacctttaatttcagctttattaaattctgtctttaattgtaggttaccagcaacatctggatgctcttcaacataatcgttgaatgtcatcgtgacttttccatcttttgtaacagtaaaattaccaatttgatggttttcactatcatataaaggactgttaattgtattgtaaatcttaaaatgtttaggaagatcaaaaatatagtaatctccatttttcacattcattgattttaaaagttcccatgtaaactcaatattggcaggggaatctgtacttggacggttatcctctataaatggttttccgtctttatccgtcaactttacaccggttaaaatgtttgttgttatttgctttggacctgaatttgtattctcagcagggtcgcttgatagcttttgttctggattgtcagtagcaattttagctgctgggttttgttccggattatcagtggcagttttagctgctgggttttgttccggattatcggtaacagttttagttgctgggttttgttccggattatcagtaacagttttagttgctggatcttgctccggattgtcagtaacaggtttagctactggatcttgcgcttgtttattagtatcctgtttggtgccatcttctttatagttttctacttgaacaggaactgatataggctgaaccattgttcctaaaggaaaagcgatttgaactgatttttccccaggttttaaagttgggttaaacacggtatcaactttaatttttcctttagcgtctttcaaattttctacttgatcattaaatattaattttaatttattatctttagctgttataaaatattgaccaatatttttttgatctgttactaaatccccttgcaaatctttagatacttttaatgcaagtggtatttgaactactgctgtatcatttgcgtgtgcaacttgttgatcctttattgaccaagcgtattctacttgaatggttgatcctatctttattaaattgttaggattttttgattcgtcaataatatgattcgtcgcatctttcatttcaacagtgtcaaataaggaatctcctgttaaggtttccgctcttacttgattgtatggaaaactagcaagttgcgaaaatagtacgaatacaattaaacatacattaaaaagttttttcatttttcctcctctgaacattcatttgtccattggggacttattccacatgaacaaatggaatattaaaagtatttgttataagctatttatttttgttatccctccgtttctatacgcgttctcagacaaacagaattatgttcaaagcaatattatttaacgtaaaacaaaatgtatatttacacagttctatggaaatatacacaattcgacaaaaaatgtcgaaaaaaatactgatataaataatgatatcagacctttatatgtgagatagttttcatgtatatctagtaaaaaagaatggttataaaggtaagttttacgatacatactaaccaatgtagtgtatccctttgtgaaggcttatttttgccttaaagttatgtggaaataaaaatctagatagggttggttttggtcagaatgaagacaatatgtactttgaaaatagtcatttattttgtctaaagagagtcgtgcgattagtggaccgaagttgaaaggtgatagtttcttacattgttagagaaatataaggattacagaatattcgactaacacgttactacggtcatttttgagcctgtttaaacaataagaaagaaggtgttttactccttagttacaatatctttttagtaaagataagcttaagtaacctccgctaaagattatatacttaaatgataaagagttcaacactagttcacatattttcccaaaaataaaaaacggctgttttatgtggaataaatctacaaaacagccgtttttggtattagatttctgttaagattattggttcaccgcgtgttacgacaacggtatgttcacattgtgcaacaagacttttatcaggtgtaacgaatgtccaaccgtcgtcaccacgttcaataatatgatcagctttcatagagatgaaaggttctacagcgataacaagaccgtcttttagaagtgcattatccattgggtcatagtaacttaaaatgtgatttggtgcttcatgtaagctaagaccaatgccgtgaccagttaagttttgaataacattgtatccacttttatgtgcgaagtttgaaacagcacgaccaatttgattttgttttgagccagctctaacctttttcattgctgcccaaaatgcatcaaccgctgcttggcaaagtttttcttttgcctcgtcttctccaagaacaaatgaaatgcctgtatctgcataatagccatcaagtgcagcagatacatcgacgtttactaagtcgccttcttttaatacacgatctcctggaataccatgagcaacttcttcatttacactaatgcaagttacacctggaaaatcatattctttttcaggtgcagaaatagcaccatgctcatctaatacttttttaccgatcaaatcaagctctttcgttgtcatacctggcttcgcttgttttttcatttcttcacgtgcaagcgcaacgatgcggccgatttttcgtaagccttctaaatcttgttcattacgaataatcatgaaaaccactgtccttcctcgaatatatatcttatccgattgtatcatgtttattttcgtcctgctactcgcttgcggtatgcgggttgattcctctcataaagaatacatgacaattgtcatatcgatgtcatgacgcatcatactgtttcctaagttttccaaggaatacaatgtaaatataagaaacagcgggggtggagagatggaaaagattattgaagtaaatgatgtttctaaaacatttaaacataaaaacgcagtaaataatgtttcatttcatgtaaataaaggggaaatagtagcgttgcttggtccgaatggtgctgggaaaacaacgacgatgtcgatgatgcttgggttaaaggaaccaacggaaggtaaggtctctatatttggaaagagtccaaagcatagagatgttcgtaatagcctcggtgcgatgctgcaagaagtaagtgtcattgatagtattacggtggaagaggcaattgagttattccgtagttattatacgaatcctatagagaaagagacgttactgcagttatcaaatttagaatcagagcgaaagcaaagatgtgagaaattatcaggtgggcaaaaaagaaggttaaactttgcgcttgcacttgcgggaaatccggatttgttatttttagatgagccgacagtcggaatggatattacgtctcgaagaacgttttgggaaacgattcgaaagttagcaagtgaagggaaaacgattattttaacgacgcattatttagaagaagcagatgctttagcaaatcgtatcttattatttgcgaacggaaagattatcgcagatgttacaccagacgaaatgaaagcaacgatttcgagaaaaacaattacattttactcaaaggaaagcattcctacaaaattactaaaggaattaccaaatgtaacagaagtaaagtcaaacgaaggacgcttcattttaacaacggaggatacggatgcaactttaaaagccatttatcaaaggagtttacctgtaacagatgtttcagttgaacgtggaagccttgatgaggcatttgaacagtttgtcgcaaatcagaaggaggaaatcgcatgagagcgttatggatgcagtgcaaaatagaaattttacgtacattccgcaataaattatttatctttttctcattattaatgcccgttatgttttactacatttttacaaatgttgttcaagtaccacaaaacggagatgcgtggaaagcacattatttaatttcgatggcaactttcagtattgtagggactgcactctttagtttcggtgtgagactttctcaggaaaaagggcaaggatggacacatcttttaaaaattacaccgcttccagagggagcatatttaacagcaaaaattatcgctcaaacagtagtaaatgctttttcaatattagttatttttattgcagggatactaattaatcatgttgagttaacggtagggcaatggattggtgcggggttatggttattattaggggtaacaccatttttagcgttaggaacagtaataggttccattaagaaggcggacgcagctgctggcttagcaaatattttaaatatgagtttagctatagttggcgggttatggatgccgattgaagtattcccaaaaatcttaagaacgattggtgaatggacaccaacataccattttggaagtggtgcgtgggatattgtagctggaaaatcaattggatgggaaaatatcgcggtattaggaggttatttccttatatttgttgtagtatcaatatatataagaaaaagacaggaagcggtataaatgatagagaagaagaggattgagatttttccaaaacatatgggattttttccgtacatgtggcttgtgtatttattatttccaatttaccatttagcacaagcatcagggtggaagcttgtgctaggaagcggtatgttgatactttttattatcacataccgtcagctatattttgttcagaagacgtttattttatgggcatgcattcaaatgatactcatctttttatttgctttattttataatccttttatgatattttttggctttttcacagcaagtgcgatgggatttgcgccaaataagaaagtatttcgagtgctgttatgctcgttagttataatgcttggagcatttttatttgtaaatatgaatcaaataacaactacaagtttagtaaatatcgttccgatgtttattttaatgcttcttacgccatttggtatgcgtaattttaatcagaaaaagatgttaagaaatcaattagatgaggcgaacgagcaaattaaagacttagtaaaacgtgaagaacggcagcggattgcaagagatcttcatgacacattagggcatacgttatctcttattactttaaaaagccagcttgtagagaagttaattgtgaaaaatccagagcgtgcaagtgcggaagcgaaggaaattacacaaacttctcgtacagccttaaaacagctgagagaattaatttctgatatgcgtatgattacggtagaagaagagctagagcaaataaaagcgatcttacaagcagctaatattgaattagaagtgaggcaagaagcaagatcgagctcgttatcaccaattgaacaaaatattgtcgggatgtgtttacgtgaggctgttacaaatgttgtaaaacatagtaaggcgacgcggtgcgcagtttctgtattagaatcacaaggtgaactgattttgaaagtagaagataacggaatcggtttaacagatcaaaatcatgatggaaatggtattcgcggcatgaaagaacgaattgctcttattgatggatttgttgaactaggtacaatcaatccagggacgttgttaacagtaaaagttccagttgttattagaacaggaaaagatgaggtgagggcatgatccgaattattattgcagaagatcagcggatgcttcgtggtgcgttaggggctctgcttgatctagaagatgatatcgaagtaattggacaagcggcaaacggggaagaggcgctaaaattaattgaatcgttaaaaccggatataagtatcatggatattgaaatgccgattcaaagtggattagatgttgctgaagcgttaaagaaagaaaaatcatcatgcaaagtaatgattttaacaacatttgcacggccgggatattttgaaagagcaatgaaagctggtgtgcacggctatttattaaaggatagcccaagtgaagatttagcggcagcaattcgtaatgtaatgaaggggaaacgagaggtctcccaagatttaatgtttggcttatggcaggagcaaaatccgttgtcagatcgcgaaaaggaagtattgttgcttgcgaaagaaggaaagacggcaaacgaaattgcgaaggcactttatctttcgccgggtacagtacgtaattatatttctgaagtattagcgaagcttgatgcgaaaaatagaattgaagcaattacaattgcggaagaaaagggatggatatgaaaagaagtttacctatgattggtaaacttcttttttattattgtaccgctattactttatttattttttgtaacggtttgtaaccgtgtgcttcaaatgcctttgcaaattcatttgatacggcagtgccatataaatcttttgcagcttgtacaatatgagattgaagtgattcaaagtcttcagcggaagttgcataattttgcaatgtacgcataacaactttacttactttttcatttccttgcttttgaacagcaacaccgttatatgttttaccttcagctaattgatataatacgtgactgataataccagaatttacgtgtgattcttgattattaccatcgttatagaaatcttgtaaatttgtatataatttatgaccgccgtcaccaatttcctttgggatatcacgaattgttaggccgcctaatgtatcgcccataatccagtttcctttatctttctttacgtaatattcgatttgtgtaccccagaaatccgctaatccctcgtttagtgcagatgtttcagcgcttggatatctcacgactttatttttcgtcgtgccactaaatacagcatgtccaaattcatgagctgttacatcaagagcggatgttagttttccgtctagaccatcaccaaataccatttggttccaagcgggatgccaaaatgcatttacatagtcttcttttacaccatcactaacttcagtagaatcaaaaccgtgtacactagcaacaacttttgaatctttattgtcgtaactttttagattatgttctttcttaaagtaatcgtaaatatcactcatattcttcatagcgcccgcggcttctttatctgcaaaattaggattgctacttgaaattagtgtccctggataaccagcttgactatatcctccgagggaatcggcgtagtttgcattataaatataaataccatttccgcgtgataaatccgctaaataaaatttcccatcagttcctttggcaatattgaaagagatgttttcttgaagtgcatttttcccagttccttgctcacttgcaggggataatctaggtgatgttacttgatttatagtcttattctctttgtttttaatgaacttttcttggaaaagtacttcgccagtttttagatcaacgatagcattgccgtttataatttgttcattgttttcataagtaaatgtaataacagttgcgaatgtataatagccatcttttttcttataaacaacggtttcgctagagaattctgtctcaactgcatcacttggaatttgaactatatcgcgtaatttagattttacttcatttttcgacaaaaaatttgttatagtaagattaggttgttgatttaaattctgaacaactttaccactaacagttgtgatcactccatttttatctacttttacaatgagatcttggccatatactttatagtttttatatgtttgtgcaaggcgaacttcggtttgattttctttagtttctttatttgtaggttggaaatctacatttttttcagtagtgacttgttcttgttgagctttcgccccatttacctcaccttttaaatactttttagcaatattttctttcgtatcattttgaggttgtgttaatttcccgattgttaaaccaggctgagcaatttcaactttgactgcacttttgtctaactcttgagcatgaatagcttctgttgataaagggcaaagaagaccgaatgtaacgaaagcactagcaagttttctataattcatctataacactcctaatctattattgtatgtgagatgaattgtatgaaaaatttgccgaattatatatatattatgcattatttcatatcaaaaattgtcgaattcacattattgtagtggtatgacaacttaaaaaactagattgttataatgggatggtgagtaagtatgcacgcagaaaaattaggaagtgaaattaagaaaattagggtgatgagaggattaacacaaaaacagttatccgagaacatatgtcatcaatcggaagtaagtcgaattgaatcgggcgcggtatacccaagtatggatatattgcaaggtattgcagcaaaattacaagttcccatcattcatttttatgaggtacttatttattctgatattgagaggaataagcagttaaaagatcaaattattctgctttgtaagcaaaaaaaatataaagaaatttataatagagtatgcaatgaattgaaaaaggaagaatatcatcccgagcttcagcaatttcttcaatggcaatattatgtagctgcttacgtattgaaaaaaatcgattacgaatattgcattttagaattaaagaaattgctcaatcaacaactggtaggaatagatgtatatcagaacctttatattgaaaacgcaattgcaaacatttatgctgaaaacggctatttgaagcagggtattgatttgtttgaaaatatattaaaacaattagaggcattgcatgataataaagagtttgatgtgaaggtgagacataatcatgcaaaagcattatacatagacaatcaatacgaagaagcgctttgtcacgcaaataaagccattgacctatcgtgtcgaattaacagtatgacattgattgggcagttatactttcgaaaaggtgaatgcctagcaaaacttgggtgtgatagagcagaaattgaagatgcttacgaaaaagcatgcttcttttttgatatattaggaaaccatgaattaaaagaatcacttataaaaaaaatgaagaaataaaaaagacataaagaacaaatatgcataattgcataaagtctggataatttttcatgatatatttaaagaaaaaatgcgggtgatggaatatgaaaaaactacttattggtagtttactaacgttagcgatggcatggggtatttcattaggagatacagcattagagaaaaaccaaataatttctcataataatcaagagatacaattagctaatgaagtaccttttgagttctaaaaaacaaccgtcttacttagacggttgtttttttatggagtaacatccaaacgtctttactagaaacaggtttgctaataaagaatccttgaatgtgatcacaattttgtttatgtaaaaattcccattcttctgctgtttctacaccttctgcaatcacttttaaatttagttcttttgatagtgtaataatggaagagacaattgcttcttctaaagggctagttgtaattccacaaataaactctcgagcgatttttaatgtgttgattggatattttgttaaataagctaaagaactataaccagtaccaaagtcgtcgattgaaatttgaataccgagattttgaagttgttctagttttgcaactacagattgattttgattaattgcgatgctttccgtaatttcaatatctagtgcttctggtttcagttctgtctcttccaacacctttgaaatagttgggattaaatctgcatggttaaattgaacaacagataaattcacaccaacttttaagtgagaaaaaccttgattatgccatctttttgcttctaaacaggcagtacgtaaaatccaattgccaagttcaataataaaaccagtttcctctgctagagggataaattgggcaggagatacgataccgagttttggatgcttccaacgtattaatgcttcaaaaccgataatttgttttgtttttgtgcttacttgtggctggtattcaaggaaaaattcattttgttgtaatgcttttgaaagttcaccttctaagaattgaatttcattttgagcgatactcatttcttttgagaagaaaacaaatctgttttttccatttgctttcgcacgatacatagccatatcagcatttttcattaactcatttacatcagttccataatcagggtacatcgcaattccgatacttggtgtaatagagagttcttcgccttgaatgaagaatggtttgtttaaaatagttaaaatctgttcagctataaaaattgcacttttttctgagtacatttctggtaatagaattgtaaactcatctccaccttgacgagcgacgatatcttttgaacgcaagcaaccgcgtaatctttttgctacttcaattaataataaatctccgacgtcatgaccaagtctatcgttaatttttttaaatcgatctaaatcaaggaatatgacggcgacatcatttgcgttagtttgagctgtatttaaaatggcttttaaatctttttcgaactttcggcgatttggtaatccagtaagtgcatcgtgaaaggctaaatgttctacttgtttttgtttttcatataaggtggtaatatcacgtgctatcccaaacattccgaccacttctttgtttataaaagtagggataagtgtaatatgaagataataataatagccttcttgttcttttgtccgaacttctaacgtttgtggcctaccttcctttgtaatttgtaaagccttctttagtagttcgtggtcttttgaatcaatgaagtgtaccagagaatagcttgccacttggcaataataggcagtaaataagctttcgcaagccttattagattgttgaaaaatgccattcatatttaaagagaaaacggcatcgggatgatcttcgaataaagacttatagcgttgttcactttttgataatgcaaatgcaccttcttcaacttcatcctctagttgtgtagtcaactgttcatatgtaaggattagtgcttgattatctttccacatgtaaagttgccgcaagaataacaaaataagtgataatacgagaccaattaacataaatttatcatcccaaggttgaatgataataaaggaaaaagtaataattatactaaaataaggtagtataaaacgtacataatcgaatcgataatattttgctttcgtttcatgttgcattggtttatccaagatatatagtatggaagaaagtccaattaataaaatagaagcagtgtgtattaaataattaaattcaggagaagttttcatcccaaaatttaattgaaacagatgaatgtaaccgtatacgagtataatagtgaaaccgataattaatgcgattctactagaagaatattgttctcttctatatagactaataacggcgtaaattactaatgattgtgcaataaaatagccaattaaaatccaagtttcctttgttaacatacggaagcttgaaaggtccaagataaaagttaaagtgaaataaatgttcataataacaataaagatgctatcgaatgaaaattgagcaagacccttaatagagtaaatttttataaactttatagcaaatccaacaaagagtaaaacatattgtatgataaaaaaaggtaatgctttatatgagaatataacttgcttatgaatagaaagtgaaggaagaaataaagttatttccatagctaacccgcatagacaagtacataataataaaatccaaaataatttatcaccatgcgtcatttttctaatcgctttacataagcaatagcaagaaaaaagtgcagcgaaacagaataagaaaagaatcccgatttcttttatattcgactcatttggtataaggaatatccaaagagcaaatataaatatgtatattatgacagattgtatatactttttttgattaatcatattatgactccgtttcaataaagttgaatctcggggagaaaatgctaatttaaataatagcatataaaacagaatgttttttactataaaaattacttttttgaaaaaatggtgcaaagttacaatttaccactgtaacattgcaccacttattcttttaattcctcttatagcagaaagttcatctattaattggaatagtgctaagtctttttgtttactttcaatcataatatcgaaattatgattgtgtttttttgcaatgtgtaagaaaggcttaataaactctaaatcgatatattcagcatgagccctaaattctttttccgatctcggggaggaaatgtgaactttaggagagatatttgtatgtgaccaagtttcaaaaattgcaggaagcaactcttctagtggttcctcgcaaagattggccatatgatgatgataatcaaatacaaatggaatattttctttttggcaaatggataaagtttcagcggttgtataggttttatcatcattttcaagagtcatttgtttttttatatgtgtaggaagtttttttatgttttcatggaagcgctcaattgccttttctttatttccataggctccacctacatgaatattaatgtaagaagaatctgcaatgcctatagcatccaatattttataatgataagtcatatccgtaatagcgttagtagtaatatgtggcttgtcgcttgtaaatagcgtaaattgatttggatgaaaacttattcgtaaattgtgttctttaattaaagcccctattttacgccaaagtggtgtgaataccccatgcccatcaacttaagaatttgcactacccccaagtgtcaaaaaacgttattcaatcttctgcaatatctagtaagacttgcactgaatttgttccaccttctcggctacacacttccaacatttcatggaagaataccaattctctaaagttaaacgtttcattgaattctctaaatgcacgatgcattgtggttccaccttctaataaaagagaaactttttctatttcttcttgaatgctttcatgcatcattggtttcacctgaactaacacacgttttgcattgttgctaatttgaagtgcatttgctactgccttcatatagatagaaagacggtcaatgacaatcaagtagtaacatttttttcttcgataaagaagaaaccttggaactaaaaatccagataaaacagtaatcagtgtaaaaagatctctaccaaaggaaaaatagaatactgctgcaatactcattccggaaagaatcgtatatacccagtacatactttttgtcaatttccactcgtacttttgggcttcttggataacggattgtggcaaatacattcgtatccctttgatatttcttaattccaagcgcctttcttctttctcattttcttgaacaaattgagaaagagcagaacctttagattttgcaaaaagtaaaacgagcaatcctacactaataaagattaaaaatatacatccataggctaacaaactatgcatactgcacctccttttgtgaaaggaatggcgcataaagagctggatttacagtagaagaacggaatttcttctccatttcagctgacatttttgctgtaatgatatgatctccatgaatctttcctactctctcattcatttcatcgtattcctcacccgacagaataaattgagaaagctgattgaactgtatatcatctcgataatctaacaattcaatcatctctgtaatatagcgattcccatcatctttcttctctaaaaagacaatcacatcaaatgtctgtgaaattaattcatataaatactgagcatcaatattcgcaccactttgcagacacataagcattaaacgtctaaccgcttcttttgcacttcttgcatggacagaggtgaaaccaggatgtcctgtttgaaagaagttaatcatttttaacgcttctttccccctcgattctcctacaattaatcgctttggtccttgacgtaaagcatttgttaacaatctgtcaaaatcgattgcattttcttctacttccgatgccctacattgcatcggaacgaagtgatgttctggaaatatgcgatgtaaatagagttcggggttatcttctactacgagagtacgttctttcttcttcccatttggaatatgagaagcaagatacttcataaactctgactttcctgtacctgttgctccagcgactaaaatattcattttggctttcacagctgcagccaaaaagtgtaacatttctttcgatgcttgattggtagataacatacgttctttagaggcacggaggtgatctgcattcttacgaatcgttattgttgttcctagcccccctagctcatctagggctatattgattcttatatacggaaatacgcagtccacatacggctttgctgtatttaatgactctgatgtactgtttaccatcttataagctagggctttcacttcttcttctgtctcaaatcggtaaggaaatgtacattctccctctccgattttttcgtaaatgatttcttttgtgccattgatataaatatccgttacatccttatcttcttttaaaggttctataatcccaaatccaacaatttcatcacacaccatatttagtaactgttccgaaggtacatctgaaacgacgacttgattgcttagtaaaaagcctttaataatttgctccacagctgttctcttctctttattcataaaggattcgcttaagatatcacgatgttcttttactaaaaatgcacgaatttcatctgtaatatctttaatttgttgagctgtagttgttcctaactttcgaaccgatttagaacgaatcctataaccaaagtgatataagtccactcgatttcgctttaaggatacttgtttttcctgtaaatagccccacatactacttgccacctttttaatttcgtaaaccaaagagaccctttttcatagaggagtgctgggatggaatattaagaccagctacttccataatatgatggacctttgcattaatttgcggggaaccaaattgcattccccattcataactcgtacgatctctgtcatacggaattgtcaccgcaatgttttgggaagaaagcttttcaatatcttctacatagtcctcgtctcccatattcaaaacatgaatcatacgaggtaatgttagctttgcttcttctattagttgtaattctcttttaattgctaacgcaccacgagggttgccatttagcacatgaacaacaaggtctgattggtataggattgggtaactaagcacctcggataattcagttggtaccgataggatgatgtagtcatattctgtatctacaagtgattcgataaatgtcgttacaaacaattctttgttttgaatctctgggaattgagttaaactataacctgatggaaacaccagaaaatccatcttatcgtgtaatttttgcgtcaaccttggattcacttttttttctagtaaatcttgcttggtacaaatatactgcaagagattgtattcattttcttttcttacaagccctagcatatttttactctcatggctaagacctgttccaaccgcgaagtttggtcttacttggtccgcttctacataaagcacctttttccctaaatgagctaactcatttgccatcgcaatacttaacgtactttttcctacgttttcgtttgtcgcataaaaggcaaccattcttacttgccggtccatcttaaaagccccttccttatttggattcgttcagatactgtgcaacatattcttttacacttttagatatgggattggttgaatgcttctctacatagtctaaaatatttttctggtcagatatttgcgagaatccttctgctggttctaattctttccctgtttgttctaccttttgtccaactgcaacaggaattacatctccaagtgttttcgcacgatttagatattgaagttgttctggtgaaacagccaatgtatataatcgcgttacttttggcttttgttttccttcttgttcctcttttgattctttcttttctagtacaaatgcatcttctgtattgctatcctttgcagccgtaacacgtacacgttggaaaagaccaccgaatactaccttctcattgtccccgtccttcacaacctgcttaaaatataagtccacataagtgttaggaatgatactattacctgaacttgtttccaaatcaacaagtaacgggaatgcaacttctccatctttcaaatttaaaatagcagagtcaggtaactcctctttctttactactttatttttaaaaagatagctattttcggtgatgggctgcccatcatttgtccacttacctataacctcttttttacttacacgtaatgcatttggaggaatcccatcaccaggtaatgttcgttccactagcatttcttctttaatctctgtatgcgcaggtatatcctttgcagctacaacaacttttgttggttttactgcattttctactgcaaaatgattgtatccatagatacccgctactgttatagcagctaaacctaccgctgtaatctgcttcttgtgaaacttagacggcttcaatgtttatattcctccttatgtagcctttaaacgcaaaaaaggacacacctatggcgtaaaacgccttaggtgtgtccttttagctaatctaaagtctatatgaaaatgttggatttattttctctaatattacaatctcaatattatgatatatatagtttcatgtcaatcatttctaaaaaatatctgttttttctatttaaaaaccacgtaatcgataattaacctcgctccaaaaaccctgttataacaagatttctaacctattaagcatcccaaaaatatgttgtaattaatctaacacaactgaatattccaaggtgtcggttgctatcctttctctttcattttatggagaaaagaagagatcatttggaaatactgttcacaatagttgatgcaagaggcaaaattattattaaaacgaaatcaattttgttcctgtttcaaaatactttgcaggagcataacttttcccattccgatcctgaaattcacttccaatatataacgatgcaatcattacgataattccaatgaaaattacacgtttcatacgttgttttttctttttatccattcaatattcccctttctacaaaaaaaagacacatcccattaagggatgtgcctttggtttatccattcagctactagtttaagaaggatatcttattgtgttgattcatctaattatactatattttattctcatttcctatttctcatgtaataccaatctgttaatttataaagtacatcttccttaccaacccaattccaaccaactccacttcctccagggaatggatcgtcaggaaatactcttctttttatgaaatcatcatacgcaacacccttaatctctacttgctcagttaaacataaactcatttcattgatacctgctggagctgtttctacattaaaagtgtatacaccatcttttgtcttcaatggtgaataccatttttggccaccatcaataattttctcttgtccatcccaatataaagacttagttggtcttttactatcaaaaacatgtcctgttgcttcagataaatacatatttttaggtaggaatttcgctgtagtatctttaagttctttcttctctaaatcttgagtagactttaatccttcgtctgcaaatgggtattgtgccttagcagcagtaaatacaccagggtaattcgcattccaatcatttttgtacttaccgtttacttcatacgaaaatccataaccagaatgtagcttagaaggagctaaattatcaatactccctgtcaaagtttcataatacatttccccagttatatcttcttttgatacacgttcacttactgtttctactacaccttttacactcgttacaccacacattgccttttcttttgaaggctcatagattgctgttttaataggattatttttgtatgtagtttcctcgatgtctatacggttaccagcagggttaatttccgcttgaattgttcctttacctttatgttgccagtcaagattcagggttttcttttctccctcagttaatcttaccttttgtaaagctacttgttgtccgttatgttttaacacaactactgtttcaggattcgtatatttttcttctaatacatctaactttttaattttattcttctctttttctaacttctgtcttgcattatctagcttacttgccgcactatctagtttattttcttcccaagagcagtctctatcataatagtgatcctttccctcggcatctacttcatgaattggattgcgacgacaataacttaagctggattgtgcactatctctatcagattcagtgctgtttatttcttgctgtgacttattaatattgttgtttacttttgctctatattgatcacgctctagtttaaaattatcacgtgatacatctactcttgttttgatattctttccttctcttgctgtttctccttcaattcggtcagcagagaaatcaattttatatttaaagtcatcttcatcacctggatctgggttaggtgttacttcagtaccgcagttgccatcaatggtgaaatcaacagctttctcatttgattccctctgaacagcatctaggactttaattttcgcagtatattgcccacacaattgcggctgccaggttatatcttcttttttaaattgccctgcatctccttcatttggtttttggttatctttttgtggagttgaacgcagataattttcttggtgatacacggtttcaccatcttttgtaatatctaacatccatttaactcggttccgttctccagcagctttttgataagggtttactgttgttccattgggatctcggtcattgtatcctttatttttacttacatactcaaaacctttaaatgtaaatttaacaggtatatctttttttccactcatagcttgaaagtcttttacttgaggtttacttgtacgtacataccacaggctatatttatttatattacctacaccactagcaccagcgtatccaccagaaagatatgcaatgtcacgaatccaataaaactgtccaagttctctaaaactttcataagtttgtatcatatgtttatccatattttctaaaacgaattctgggtttccccaatatttactagaaataacagaattattaaccctttctacttcagtcaccatacggtcacccgctggtactttactatttaaataaccttcatttgcaattcgaatatacggctctgaagtatcttcagcttgtactaaattctcccttgggttatcccaattaaaagagccgttatatactgcaggaaagtgcacatcggccctgtataaagattctttagctgcatatccacttccaggtctataatattttcctggcaactgtaagttaagtgaagttaaaaacgaatcattttgaccgttatagaatgggacatcgttgtttttagcacttgccatacttggtatagcaagcatagttgaagtacaaataaatagtaaacctctttttaatttcatttctttctcctcccaaaacataaaaaaggacacacctgtaccattgggatggtacgtaaggtgtgtcctttacgtatgcttaattaaatattatattcatattttataatacttagtatatcattattttgtttcaatttgaatatacattgtatcaaaagctgcagtttgaccaatacggactttataattacctttttgataattgttaatagagtcttgcgcaatagtttcatcaatttcttgctctaaattcaatccacttaagaaggtaacccatcgtttagctaattctacagttgctggattattatctaaaaaatagattttataattactatttacagaaccttcaactgcgaattgtgcacctattgaaccagctggaagatacatatctttatccaaaatacgtactcctcctcttaaatctttatatttaagattcgtattgtactttttattaatatcttttactatattttgtgcttctgatgataattgtttttgcacactttcatttttcaaagcttcagggtggtaatcaaagtcaggttgtgcaatctcaacgtctaatccctcaggtactttaggctgttctggtttttcctctggttttgtttctggttttgtctctggttttgtctctggcttagtttctggttttgtctctggctttgtctctggcttagtttctggctttgtctctggttttgtctctggttttgtctctggctttgtctctggctttgtttctggttttgtctctggcttagtttctggctttgtttctggctttgtttctggctttgtctctggttttgtttctggctttgtctctggttttctttctggttttgtttctttttcaactgcattaatagagttgtataagaattggctatattgttcacgggttacatgtgtatatggtgagtacatattacctcctgtaccaatagtaacgccattttcttctaatgcactaattgcttttaatgcccatgagtttttatcaacatctgcaaattttgttgttttcgttgccttaaatttaaaagcatttgtaagcacttgtgccatttgttcacgagttaaaatatcatctggaccatacttcccatcaccaaatccattgacaagtcctgctttagcaagtgctaagatttctttttcaaacaaatgtcctttaatatcagtaaacggatttttgaaactagcatttgcatctgctggtttaacgtacatatagatcatacgagcaacttgcccacgagttacattgtcaccaaagccaaagatattatttccgtacccttgcactactttacgatttgttaaatcataaattgcttttgtagaccagtgatttgctggaacatcattgaattttaatgagtctgtgttatcagccttagcagtaaatgctcctgctcctagtaatgatgtacccataattgttagtgctgttgctgtttttaaaaatttgttagccattgtttgttcctccaaatatattagtttttcatagattcttttattgtacctaatttaaacataaaatccagataatttaacatataaattaattaattaacattttttataacttctgtctatataggtatattttcctgacaaaaaaactatacttttcagcatagtcttttatagtacaaatcttagaattttcattacttaaaatatacttgtcccaatccctctttactcgcccatatcggagcttttatgccatctacaccaatcaacttaaatatgaagaaatggtgttctgctttcaccttaaaagaaagggattgattatgatcgatgcgtccctttgtatactcatacttccatccatccatcttttcttctttcattcttttctctatcccagggactaaatccaccctttttccattgtaatcatattgaaatccacccttattttctgcgttttctaccatatcagcagcaaagttatgtgctttcactaactgtattccgtacaaaacgccttcgggtaaaaggctaattaataataaagaaaaggtaaggaatagagccgtagttactgtattttgcatttttaatgcacctactctttttctttattttacgtttccacctatttgtttttcttttccattcgcatcataaataataatacttctcgctttactctttatcgtttcttttttttcatcaaattgcttaaaataactagcagcttctgcatcactttcgacagcaatcattgctggtttttcctgtacatcatgtacagtgaagttacgttttgaagcgggatctttaaaatccgcattaccgttatacgccttttcaaactcttgtttcgctttttctggatcaatagctatttcttcttctgcacgcagagtacctacttttacagacttagccacagctatctcacctcccctttctaaagacgatttattatcagtatgtgttgtatctccaatcaccatatcagttacaaaggatagacaacctacaaataacagcaacatacttgctgcaacaataaacttttgcattcctcttcagcctccttaactttcagactttcgaaatcgaaatccacttaaaatggaactttttttggaattcaacaattgatttggtagcaataactctgctatttccttcattattccttctaactctttataatagttgcgacttgatagtaacgtactactattcaattgtgactcaaacacatcttctatttcatatggtggtaaagcagttaataccttatctccaaagcattcttctactatttcatgctttaaaagtacaggagaaaacttattcccaatgatcctcactttctctaaacctaagtaagaaacgagctttctctctttttgtgtaagaggatgcgctatctttagcaattgatgcagatctggttccgctacaaagaatatgtaatccgccatttcacatatctcatggtataaatctttatcccaatcgcttcctgcatcaataatagatataggtgcttcctggttggccaataaaaccttaataaaatggtcgaagtcctgctctgtttcgtttttcagctcttggtcaactataggattctttacaatatagtttattcttccttgcttccattttggaattaataatatatcagattccttctgtagcatctctttatatcgctgcaacataaattcactacgatagttttctggcgcttctgtatatccctttaataacggatacgtataaccatcatcatatagattctctatataattcacatcaatctgtagttcatttaagtaagcggctaaaagatgtgaaacaaatgtggcaccacttctcctgttcatgctggccacaacaattgttcgtcttggaatagcaataccaatttgtttctcatatactggctcaaaagccaatttatactgtttttttataattggcgcttttgacgtttcttcctgaatagacttacgcttttgtttgtttttaaataattttaaattagagtgtgattcactgttgttaccttcctctaattcacttgatactttcgcttcttcctcatcaaaaggcacttcaggcaatttcgtatgttgcggtgcttgacttgctcctacaatttccaccacatttttaatatccgattcctgtagcagctgtgggatgactttattatcaatatcaattttacgagagttaaaaatgtcatagatacctagataaatcagtttcgctaaaaattcatcattattttcacgctctgtaaatactacaatgcgaatatcccgctgaaagcgaatgtctcttaacttctgtaaaataattaattctcgcttatcttcgtgtcccgcatcaatatttaatcgtttgtcattaatacatagaatatcaggttgctccgtatctagaatttcatctaaatactttatgtgcatgacatcactatcagctacttcaaatcctgcaccaacaaaatcctcacgtaaatatgccgtatacacagtatcactaatagctaaaacaatctttttcattatgaaaaactcctctttgatagaaaatcactttaaagtaatagcatgttttcaaaaggcacttttgttgcgttttgtatttttgttaataattcggtgagaagtgattctatttcaaatccatccaaattacatggcatattatcaataaggttatatttgactctaacctctaaacgatcctctatttcttctaacggtatcgcactaaataaactttgttcatatataaatccatcccgaagatttttttgtatttctgtcttgtctttgtaaacaatggttacttgtgctaattcaataaaaggattatctaaagttaattttgtattccagtttagactccagatttcacagcggccgtccgcatgcacaacattagcagctacagatggagtaattgtaaataaacgatctactggaacatttgtaaaagtagttgtttttccttcaactactttcagtcctctttcctcacgttcatgctcaagcgaaatttccgcaccaaacaatgcaatttcacaaaatacttgttccattatgggtttaatgccttcatacgttcgaacagcaaatacactaaattcttgtgtttcatccgttcgaactaattcataaatgctaaattccgctgcatttacaattgcaaaaggaatatcttgtacaaaattaggatttataaatagagaatccggaatcactgtctctggatgtttgaaaaactctaaaccaagctgatatccttttagaaatgcattcttagcagcagctgggaataatgtttcaaatcttttgagattgcttttaaattgcttctcttcgacctcgttattaaattctctatcttgtaaaatgtttacacgatcagcaagcagtaaaaaatagtagttaataagagaattaattctctcctcaaaaacttgattatctttacaatatttatcaaatcttcttttactttcactaataatttcattcattctttaatactctccttatcattttctagttattaaataaaaaaagacacaccaatggcaggtatatgccctcggtgtgtccgtttagcaagaattaaatatctctcgatttgtatattaattttaaacaataaaacttatgtataagattatctatataatatctaaatgtcaatactacttcgcaattattaaataaactcacaaaaataatgcttctaattgattaaccttttcttttttgcatatgtcatttaataacctaattcaggtaatactattagtatatctaagtataggattttcataacaaaatttcgatttttttatttacaactaaatttcaaaagtaaaaaacattcatttaatatattccttaccttagagaactttaaatataaaacaatctttatattactcatagcataactaacagcaaacgactaaagcatattaatgttatgtaaacaataaagcgacacaaactcgttcggttgatattaacatatcaactgacattgacatgaaatttcatattgagagatgaatacaagttaaactaaccatccagttcatacctaagccaatttattaattacatatttcgcaaacaaaaattataaaattgcttttaagttcctattttagttattagacaaaaagcacgctaataatgaatatacatccataacatatttttcttgtaacaattaaaatgacttttagttagtatatacttatattagaatgatacacaaaatcatttcttctactcaaatactataaaaactacaatctataattatagattgtaaagatattagctgcactttttttatcatagaaaagaactcatacttatagtatgcccaaataaataagtcgtatacctaagtattacaactgctatttacaaccaaaactcccaatatgctacaccgttctttttataaacctccttgatcaagaaggtttcaaagaaagtctatctccatttaatttttaacacaatttgaagtacacaacccaaatttgttaatgtcatataaacaattaaccaacactaataccctcgaatgaaattaacatatcaattgacattgatatgaaaggaaataaaaatgtacagatgttaatttcatatcgatattttatgtgttatatcaatccgatgatactcagatataaattaacgtaaaaccaattagtagatctacatttattatcattagttactggaatgtaataactaacaaaccagcgcatgctatattttattactaattacttttattaactttttaatgggtatctaagtcataaacacccattagaataactaatatctctaaatgtaaatggcagtttctatttctgatcaacatgacattaacaattaggatgatttatcttttgtttggatgttttttgttaatgtcatattaatctcatagaaatccctcatttcatgtcaatgttatctttatggatattcgaagtatgcttatctaattttcgttaacatatcaatctcattgtcttatttatgaacttattaatatatgcaaacgcacactagaaatcggatatctacaaaatacatcacttggattattctagtattctgagtcgaaccttagtatcttaaaaacttcctcaaaattatctataaaatccttcgtttatggttcacatttcatgttaaaaggtaatctttttagatcaacatgtatacaaagggttgatctatatctattatagttaacaaaacattaacaataggtgttcgtatgttattagtaggtggttttagtgtcggtttcatgtcaatgtcatgtttcatgttaatgtcaactcgcgggctcaatctgttctttaatgctgataaagatcattttgttgatactgactacataaatttctatcacgacatgcaatatacaacttaaattgtacattctacactaaattaatatacataagtagatcctaacttgtatgtggcaagtaaatagggagtaggacgaacctcttcgaagtattatgattgtgctcctatatccttaaataccgttttgtttattgaacaatactaactctacattaatattatttactttttactagtttttatacgtgataattagattttgggcgttactttgtgtattttccgttatatacccggattatatccttataacttatttacaaaatagctttatttccttatcattaatattaagtagcctgatttgttaatctcatagcaactatcaatagcgctactgcaataatatatatattcccattaacaaaacattaccaattatatatttcaaattggtaataaagttactgattcaccgaattctatactaaacgttaatgttctgttaacaagtatatgtttacatgttaattctatatttcatgtaattcactggattggtagggatttttactaatattatcgaaatactagctaacatgttaatctcagctcacatgttaattataattagttatttatgagttgatttttgaggaggtagttacaatgattgagcaaaaaaatgaaaaacaagaccatcaaattaacgatgatgatatattagatgataatgttttcgaaaaagcatggcggataacagaattctcaaaactagtaggacgtcatcataatacagtttataattggttcaatatcctagaagaaaagggacttcatgaaactttaagaactcaaaatacaaatgaaaaactctataatgctttagatcttgaaattgctctatttataaagcagaaaagggatgagaaatggtctctagatgcaattattgaccttttaccacaccaatttgatttaagaccagtttcaccagaacatcaaacaaatgaggtatccactgaattaaaccttcaagctactgctgaaattattgaaaaaatggtaactaaacagttagaagaaaaaataaaacatattgaatctcattatgaagagagggtagaaagtatattaaagcaattaccacaaccagaagatgtagaaacgctaaaattgcgtcaacgccaagataggcttgataattttattattgagcatagggcacgtcaggaattaagaaaacaagcagagagcttatggaataataaacctgaggaagagcgcactagaaaagcaggctggtttaaaaaagaggaagacttgagtaaaaaacaactcttcatagagcagtacatacaagataatattattgagtatataaaatctcttatggattcagtggaataataaaaaagtctggaacttagtccagacttttttattattttgtagtaccaaacatcttatctggatctagaaaatctgctagatcttcatcttcatttgctccagcattattattttcttcgtcactacccatatcaataaaatctccaaatgcaaaacctaaatcctcatcctcatctatactttcaatcgtactaatttgagactttttatactgaatttggctttgtctttctttaaattcattaaattcttcaactaaacctttagataatctcgatggtaatgcatcggttttatagaaggtatatacagttcctaagaaatcattcttacttaccaaatatccattaaaaactgtaccatttataggtaaattatttgaaacttctaccttagcgtcatccataaaggaatcattaatattcttttgctcatctaggatagcaagcataccaaaatgatgtacttttgatgcttcaacagaaccatcatcgttcttcttcatcaaatcaatcgggggatggaaagagcttcctcttaatgattcttggaacatttctataattgcatggctattttctatttgattcatattacgtgaaaccttattaattactaaacagcccgttttctcaagtaaaatacgtttaaaatcttgagaatccagtattacagatgtaccagatccattagcagcggtatttaactcatgaataatttcactaatacgttgatttgcataatctcgtgaattagcaataccttttttctcattttcattcaattccttaaattcatcgtaaaaatgctggttatcagcaaacacaacaaatgctacaccttttgatttatcatttgctaatttccaaatttcctgtgaaaatttatttacttgtcgtaatacatcaggcccatctgctcggacgggaagagttacaacaatccccattttaataaagtctttgcgctcaatagcattttcaaaggctattctcgcaaacttcgcttgattcgccttgatttcagacattggatatagctgcgcaactttttgtaattcttgtctgattactggcttgttatgaaaagccgaaaattcttcaatagccttaatgattgtagaagttccagttcctccacctaaacctgcaaaaaataaaacaagttcatccgaaggtcttactcgttcagtaataaattcttttagcttttcttttgcttcctcatttgaatcaaggacttttactgcacgctcaggattcttacctaaaccacctaatttcagtgaaacttgattacttttgggtacattttttaattcagctagatctccatcattactatttagtgctaagcaattatatactgctgtaccatctgtatgtgtatattccgcaaatttatctaccattctagtaccagcttgaccaaaaccgaccatcgtcattttaactgccacttcattcttcaagaagttttttgccattattttatctctccttatttatcttttttcttttccctaactcaatcagtacttgttgccctctataagttgagatcaaaaatttatatgggtgcatggttttttcatagattaaagacattgatgatagtgtactcacacttatttcagctgaacgtctagatatattcgtacgttcaacctctaaagaataggattttcccttttttttctttactctcctatcaataactacattttccactatttcattaatagatatgcccctcatgtacttcgtctcttgaaattgtttatttactatgtttcctatgtatagaaatacactatagagtatctcatcttgttcaagtatatcagcaaacatgtttactacttcatctgcaaacttgattgtttgatatttttcacttaaaacttcgttcaagtcgtcccccccttaaaacactggttaattattcctagaaacatagtacatcattacacgtcgtatatcaagtcattataaataaaacttatatacaggacttgtatataagacttataaaattaaaaaaagaattaatatatattttataagggtttatgtatacgccttatatataatgcgtatacatgttatatcaatcttaaatttcatgtgattgacatttcaaaaaagattattaaaaaaaccaaatcgaaattctaaaaaacagattaaaaaccaccaatttttttagcataaaaattccagtaaatattatacaccttatatataagctttacatatgaagtgtatagtataatgcttttatatcgtagttaaatcgaaaaacaaattatctagtttacatacaaattttatataagactcttatataaaatttgtatgtaaaccgtatttgtaaagcttatataattcaactaaactttttaaatattccaataataaatattgttcgagtgtatttatattactagggagatttcaagacattcttatagcaattcacactaaggttttctttgttacctagctgttttaacgggatttatcacttataagaccgctcattgttaatgttatgttaatgtactgttcttcacttagtacttgttagttcacattattatatatgttataagaaaaattatcctcttttcctcatttgaattcaattccttgtcaatttcattcattcctcaaaagccagtagaagaggttgttaatttcatatgaacagcatcaataccctcaatattctacatattaaaaagggaggactaggataaatcaactttgacattctaaaagtagtaggctaacaatcacatctctactataaaaaagaaacatttgttcaaactagattattaaaaaggaaatctcatcttattaacatcaaagcgatacttacattacaataatttttttgtaatgcaggaggaatgatgatagcaattacaacctcacataaaattaacaactgttcaattttattatttcagttaagataactccttgtttaacgaagaaaaagtgaaggtaattcaagtgactaaaaccaatatgttaagtatctatagacatattgttaacttatttatgatttggtagaaacaattaatattatttgtctaagtgaatttatgattctatacaagaaaaaacataaaagaaaaagttggaattttagattgagcaaatagcagaagttgaaaagagcgtttcatcacaaataaaaagttgaatttcgaattaaggatagaaaaaattactctttattatcaataaacctttttataaatcttgaataattttaatcaattaaaatagtagtttggctatctaataaatgttaggacgtcataacattattttataaatagaatatcattataactattgttaggtatctagtagtagctcgtcctaacaaaacaaacgatttaataaagccttataaatcaataatttataagagatttataagagtagttttcatctcaacttcaacgtacaaaatgaagtatctctaaaaattaaaatgtcttatttattttttcgggttttacaaccaccacatcaatgtaatagtatattaaaaataataagtatttaatttagtttaattcaatataagaggtgtatgcattgtccgaaaaagtgtataaatatagaagatcaggtacccaaaaacattttcacttaaaagaagctgacatatttgtctttacagttttatattacaaaagagcacttacaacaaggcaaatcacgcagttatatagtgcatttgagggaagagactgttctgaagctagcatatttacaaagcttgaccgttactcacaatatggagctatgctaactaaaagaatagataaaagggctgatagtattacgaaacgcgctttattttccttaaaagaaaagacaattgaattcttattggaaataggaagaattccaaaaaaaagttcaaaaagacggtactcaagaacaacttctcttcacactatgtgttcacgtgaagtcatgatccgtacttttttagcgactacaaagaagacacaaaccaatgaattattatatgaattggatattcgttctttttaccagaaaaaaaatataaaaattgagggcaaccaattggccttgattcctgatgaacatatttcataccaagataaaaatatccatattgagatggacatgtgcaaagagacaaattctaccttagttgaaaaagtagagaagtacatagaatatgcaaaaaaaacaaatgaggatgtaacggttgtctttgttatgtacgacaaatcaatgttccttgctgaagatgcagaaccgccatacatacgtatgaaaaatctattattttctatgcggaagcatcatgaattattaatgaatataccaaatctaaatgtacacatttgctcattgaaagatgctggggatgttatttcagatatcattctaggaacagatgataatcaaaactgggaacaagatattctttttcctttatctcaacgtacagtaggagatgtcaattggcgttacacttttgtcgaaaaaattcaaacgtttaaagaatcaatagatggtggccttcgacgcacatacaagagagataaagcttctattcaagatttcttttttatttttggaaatgaaaatgattaccgaatgattgcaagattagatgatgtcgtgttttcaagaaggaatggagatgaaggcattccgcttgtagttatctatcctaaacgtgaaaatcctagagatattctactgatggacacttatgataatgtactacttctatccattcaaaatacaaatatagcaaccgatgaacagatcatggtacatgctgcaaataacgttaatccgaaaagacgtaaacttgtagaattatattaatcgtttattttttatatacttttatataactttattgatttttattatttaaggtgatagaataacgtttgaactaaacactcaaaactacaatcaaatcagaacatatgaaattaaggcaagcgacacacgctgtttttacagtgggtgtcgcttgcctttttttgtatggagaaaggtggaagtggaaaatgacaatgaacttacaatttgcaacaactactgggggagtgctctcagcaagagaagcatttaaaactccagaactagtccttaaacatattacagaagggggagctaaattttgcgtttccctacaagatatcaaaattccagggaaacctaattattattggtacgatgtaataattgaaactgcggcgaataacaaactagagataaatattgcagtactttctcaagaagaatataaccaattgtgtgaaggagatagtattgacttatatttaaaacaaactgaagatgcagcgaagttctttctaaaaaaatcaaaggaacaattcaagccagaacttcataatcgttttacattacaccataaagctcaactatgtctttaaaaagtaggtgaacccttatggagagatctaagcaaagattaccattatacactacaatcgccttaattagcggatttatcctttcatttggatttggtgtagcaaactacatccagttactctactatgcatttgaaccaccgtcttatcctatagaaattacatatgtaccactatttttaatgttcttctctttgctattaggagaatttagttttaggttctacagccgtatcccagctttacaatttcaaaatggcaagttattaattttaattgcttctcatattgcagtagatattcagtttttatggtttgcaactactcctatccatgcgaaagttattccttatcttatgaataaagcaaaacatgttaattttggtgaatatcaagcaataggggatgtattaacaggaaatttccatacactcaccatgatatttgtattcttaccgaccgtatttatgattttgtttactctttggtatagtggccatattatccgttacagagaagaaatcttaaagtgggtacaaaaatacgaatataaaaatcataagttgcaaaagtggtttaatagccaagaggaacaaatacatcctgatgttgatataggtcctcatattaagcacaaagaaatgattcgaatcaaggggaaagatagaaccctaaatggaattattattggtcctattggttctggtaagacatctagtttaattattccaatgattaatcaagatttacactggatggtacgttttataaataagtttgaaaatacgtataaaaagaataattatgatacagaagaagtaaaaggaacatttttaaatgggataactgttattgaaccgagtaatgatttatgtcaaaaggtatttaagttagtacaagcacacaagattcctgaaagttcaatttattatattgatcccacaaaccctgataccaaaaacattaatattttacgtggaccagttgataaagtagccgaggtttttgcaatggttatccagggtctgtcggaatctaataatgcattctttgaacaagcacaacggaaccaccttaagcaacatatttatttattaaaactacataacccacaaaaagatgtgacctttgatgacttaatagatatgtacgtgcgtgtaaatgtcaagataaacatgtacattttcgcttgtttaagcatgtacaaaatcataccctagaggctgcctaatgaaacgacctgtctaactttcgggggtcacttcacaccctgaacggcttttcttattaagttaaatcacgttttaaaaacacagtatatgaaatacataaaaatacgaacaaataaagtaacaacatacatgatgcaaacgggaatgttactccatcaataaaacttccattctttgaaatactatataaatctgtgtttgctggcaataaatatttcgcccagttatatctagtggctgctaatagcgcaatattgcctgataaagcaaggaatagtgaaataccaattgcacctccactagatcttgttaacacagaaatcataaatgcaaacgatgcgtacacaaccgttggtaaccacgataaaacataatatttacttgcttctacaaaaatgttttgttttattatatttccatcttggaaaataaactcactccatgcaggctgttggaatttataaataacaagtccacataaagcggagaagatcatattaaatataaataataaagctgcaaatataacaattgctaaaaattttgctgttaaaattttaaagcgactcgctggtcgtatcgttaaaaatttatatgttccccagctatattcattcgcaaaaattgtacttgcatacacgaggataaatgggagcaaaattggaaatacgataaaacctgtatctctcatgaaagaaagtggagaactgcttgccggtgctgtatccgtatctaaatgcttcatcttaagctggtattcttttacaagctcatcccctgatttttctgctaaaatagcttcttttttcatgccaagctttttctcaatttctacagttcgttctgtataatctactttccatccttttgtttccggttcaaaatactttaccgtaacccatcctaatccgattattaatactgcaataactgcaaatggaataatcgatcgcttccgcttaaatattttatacagttcgttatatactaaattaaacaatatcttttccccctgttaattctaaaaattgctcttctaacgtttttctttcttcatatacacgatacacttgaatatttttctcaagcaatgtacgaataacatttgggatttcttcatcttttacattaataagtaattcattatcttttactaaaacatcatgccctaatatttctgctgctttattcgcatcatctacacgtatacggatcgtctccatctcttcgctttggctatgctgaatattttgcgtagccacatattccccgtgctgaataatgataactctgtcacacattaattcaacttctgaaagtaagtgacttgatacaagtacagcttttccttgttcatgtgcaatttttttatgtacattctcatttcatgtattccactagggtctaatccatttgtcggttcatctagtatcaacacgtctggatcgtgaataagtgcctgagcgattcctaaacgttgtctcatgccgagtgaatacgcttttactttgcgatcaattacttgtcccatccctaacaatttcactacttcatcgatacgttcttcggtcacattaccattcattcgtccgaaatatgttaaattttcatagccgctcaaaaaaggataaaattcaggtgtctcaattaccgctccaattttcgcagctgttttttcgaattgctgtttcacagattgaccatcaatccatacttcaccttctgtcatacggatcataccaaccatcattctcattaaagtcgtttttccagcaccgtttggtccgagtaaaccgacaacctcgccttttttcacttcaaaactaatattttgtacaagtgtctttgatccgattcgcttcgttaaccgatcgacttttacaattgattgttcatttgtcattctatacaacctttccttcccattctttgtcaggtcttttcactgtaacatgattatttttatgtgtaaaatagaaaaaagcatgatttctcatgccctttctttaaaccgcaacgaattttcaccttttaaatttcgaacaaatcgataacattgcatcatcgatattaaaacgacagtcatcataattacactaataattacaactgcatatattgtaattggcgcactatttattccttgtatccctgcgattttcataaagataaccgtgaataatttcaaaaatagcatcccattaattaatccaaaaacaaatgctgctccataaatgaataattgctcctgacataatacacatagtacctcttttcttttcatattttcttctacataagatataaactcctccctcctcacatgcaaaagggagtacatcattttatatgtagtaaaaatacatatgaaaattagtacaataaaaagtgtgtaaaagtacatttgaaatacaaatgcattccctactttcaaaatagctccttcattaaattgtaacgatatcataaaaaacaaaatcatagtactcatagcaatccacataaattgcttcatccttttggtagcaaatgttataatattttttctcgctaaccgacataaagacataaaattcttcccctaccttattacatacgcattctatactactagtgtataaaaatatgacattttaaacatcgcactacaatcggaatttcttctaagtctttagtcctagaaaacgcaatgataaaaaatcacatttagaatataattgtaaaaaggaggaggttgcatgcgtataaaattactatcaatcttgtgtttattattactcacaagttgtagccaaataaaaaacaatgaagttgccattgttgagccatacaaattaacaaaagagcaagcttctattttacaaatgactccttttcaagaaggaaatagcatattttataacgttacgcttaaaaatgataaagatgaaataaatgctacaattgattattataacaatggtaagaaaacaaaagaaattgctaatatagctacctcacatttttcaaaaaagaaagtaaagctttcttttttaccaccacatttccaatttgataaagatatacaagaaaaaaggcagtggtatctgaatattgaaggtggttcaacacttgttcctgaagaagcgccaccaagcgtaaatagctctgcaactactacaatccaatctataaaaaatttaaaatacaatcaaaaaacaactttagctgctgtaatccaaaccagtaaagaaactgtaagcgtccctacaattgacgaagaaaagggtattgatttactcttaaaagaaaatgaacacgtttatctatttagtatcgagctaaaaaaagaacaataaagcggaaatgcaacttaagttgcatttccgctttattgtttaataaggtgtacttttatggatttgaatcaaatccattttctgttactactattactcatcttctacttctattcttttcttctctcttgcaatttttaaaaactctagcagctctggattactattcatttttttgtaagccactgacatttctgcaacgaaattagaatcatataactctttatatacaacttctgttttatataacttatttgccgacacgggtattactgtaattccaatccctgctgctacaagccccataactgtttgatactctgttgcttcttgtacaatacgtggactaaatccaacttctctacaaagagataaaattgtatcatacaaagctggccatactggtctcgtaataaatacaaacggctcatctcgtaaatcttctatatgtatttcatctttctctgcaagtggatgtgcctttggtaaacacaaagtgcaagataacctttgaattggctctaattctaataattgcgttggaattggtggacgtaaaaagccaatatcgatacggttatcatgaagtgcatgaacttgatctggtgttgacaattcatgtaatgcaacagacactctcggaaatttctttctatattccctaacaattgatggtaaaatatcatatatcgccgcacctacaaaaccaattgaaagtgatcctacttctcccctttgcgcactttgtgcaacttctactgctttttcaatttgttcaaacgctttttttacttcttttaaaaacatttctcctgcttctgttagttcaacctttcttttcgttcttgaaaataatgtaactcccatttctttttctaattgctgtatttgttgactaagtggtggttgtgtcatttgtaaacgagcagccgcccgtccaaagtgtaactcttctgccacaacaacaaaatattgcaaatgccgtaattccatttttggacacccttttcactttcgattaatatgtcttatatattaataacatataatttatatattagacaaatattttgaatgaacgtatagtagaaattgttaattcttttttacaatttttatgtaacaaaagaaagaggtggttactgtatgaaatggtggaagttaagcggacaaattttattactattttgtttcgcttggacaggtgaatggatcgcaaaacaggcacacctcccagttccaggaagtataatcggtattttcttattattaatttcattaaaatttaacctagttaaaaaagaatggatacaggacggagcagattttttattaaaagaacttattttatttttcatcccttctgcagtcgctgtcatacgttacagagatacactaacacaatatggaatcgatctcattttaattattatgattagcactctttgcgttaccttagttacaggacttttaacagaattgctactaaagcggaaaggatcaacgcaatgatcggatttctttgtttactattaacactattcacatattggctatcaaaaaaaatgtatcaacgctggaattggagtctactttctcctcttctcgtctgtcccattattttaattgctttattgctcggattagatacaccttatgaaacatatgaatctggtggtcattggttaactgaattattaaaacccgcaacagttgcttttgcatggccaatctataaatactttgatttattaaagaaacatggaatggctatcttacttaatgtcattgtcggttcgtttttatcagtcattacttcagcactactagcaaattattttcaaattgattcatcactagaacatagtttagcgccacatatcgtaacaacaccaatcgcaatggctatttcagaaatgattggtggcatgtcacaattaactgctgtatttgtcgttttaactgccttaacaggagcattgctcggtccttctctcatacgtatttgccgtattaaaacagcaatcgcaaaaggtattatgttaggaacaagcgcaaatggaaccggtacatcaaaagcattcgaaatcggtcctgtggaaggaacaattgcaagtttatctatgcttttaacagcaggcgctagtttagttatcgttccgcttttcttgtcttggatacattaaagaagcaagtatttacatacttgcttctttatctatatattggcacagcaattcataatcctctggaaaagctaaacacaattgttcaacttcatgtatccctttccaagcaatttcatgtattaactcatcaggatcttggattttcatattaccgcctatttgtttaacaaaataataatggacatacactggaacaccgtatgtaataccctctttttcatatattttatttacaacttccacattgtaacctgtttcttcccaaacttccctaatacaacattcttctagtgtctctcccttttcaagtcctccacttgggacagaccaccttttttcttctccctctttgccctgcagtaccattaaaacttcctttctttcatttacacataccgctgcactacctatccatctctccataaacatccctcccctactaaaattcgccctcttttttattttccccttgaaaaaaagaggaaaaaaataaaacaatgacgaaagattacatcaacttcataggcaatcccttcttagaaattaaaactggaaggatgaaaatatgatttctaattatgttgtggaatgtgtcttttgtgaagaaaatcgaaagcctcgccaagctattgtcacagttcccgccactactcagctactagccattgaaaaagtgcgtgcggaatgcaaacgtcgcttcggaaaaactgtattattacaaacagaaattaaagaaaaaattgtttttgaacaaaaagaaagctgaccatcaattggtcagctttcttatccgatcatattttcacatgaagattaggggcatcctctttaaggatcgggattttcccattatgtacgttccataatggtcatcgaacaatatatttctatacaattaactattgaatagaatagggcaaaacttgttcgcatttttagaaaagggatagggatataattcaagtagtacttcgaatactcgaactttacactcataatattaaaacaaatccttttatatgggaaatatgaattacctacataattcattcgtaaaatatattaatagtttgctatattaattttatcccgctatttgtaagcagtaaccccctacttattataatttcaccttattccatcaatagcatacatccagctaaaaccggtgtcataatcatcgaaaacctcaaaagcattcgcggtgcataatttgtaaacttcgcgccaatatatgcccctaacatggtcccgattaatacttgcaataacaatatataatctaaatatccttccgaactatatcctagcccacccccaattgcaatcggtaatataacaagcatcgttgtccctacagattgctgaatcgttagtctcaatagaaccattaatccaagctgaataaacggtgcagaaccaatcccaaatgaaccagccatcattccagtaactaatccaaggcatatacatttcaacaagtagttcatggaaaactctttatgcttatataaagatgactgttctttgttttggaacataattaatttaataaacataaaaattgccgataaaaataacatcccagctgtaaaccaatgaagaagatgtgctggtataagtgaaccaaatttagaaccaatataagagccaattgcgccaaatcctccaacaatcccgcctataataaatgcaacattgccttcacggtaatgactgacaacacctgataatgtcgtaaatgccattgcagttaaagatgttgcaagagcaacatgaataggaatatgaaatactaaagtgagtatcgcgataataaacccagctcctccagctccaacaaatcctaataaaatacccattactaacattgttataataattgccacagactttccctccagtaacacaattatccatcatatttatccttacatacaaataaaaagcatcctagacggatgctttttatttcaaaaatatgtacttaatcttgattaatcaaaataaccgctggaccagcgaccactactccagctacttctattttttcaaattcctttactgtaatagatataactccttctctttccatcaattctttactcaggacatcagtcgggattgctttcaccgtcttacctccttttcatttatacaatatgataaagtaaaactttaatgagtggggtttttgtccgtacttattaattattacccctcaccaatcggactaataatcacccaatgcatctatatatatgcatcacctccgctttcattccttattccactcaaaaaccttctcccccttccgtgacatattgaaaaataaaaaagaagctataacatatagcttccctctacgtttctttaatctttatgcaccgtatattccatgacttttccatctctatcaaattggaaaacaagctgttcgctatctattggaataaagccacgttcagtcccaagataatacaaagtggtaactccttcttccccacttctcgtttccgttggagctcctaacaattgtataatttcttcatttgatttccctattaatttatatttttgtaatagatcatctaccatatatacccgcttatctgcatgatttaaccatctattttgattaaactttgatgtatattcatttacacttagttgtacagtgcacactattaatggtatgagtgctactattaaaacccccaacatttgcttcttttcttcattacgatttttagaaacatataaaatagccctttaaatcatgactaataaaacaaatggtatgaatactacaaaaatgctccttacacttaagggtatatggaccatatcaatgacgaatataaatagaatgtacattactatatacaaacaaaaatagacatacaaaatgccacgtagcatagcgttcagaaagatctccccttttaactcactatataattcatccggctaatcatttctcgaatctgttctaattcttgcactgtatatactactttccctgctaagatttcatttctgaagaacgttacaatttgctcccgattttttaatctaggtgtttcctcactagaaagatctattatttcttttccattttcattataaaaatatacaactggttttaccttttcttttatactattagcctgcatttctttcaaacaattgtataaaatttgagatagtttcttcaccttatatactggattcccttcatttttcacttgtatagttgacgaatctttacctactatatattcaaatgtctcttctttttcaacttcttgttgatacttacccatttcatcaatcataaatgaatatataccagcattttctttcgttaaaccatgaattaatttctcttcccattctttcgtctcaagtagataaataccagttttgcacaagatgagatgatggattcgattatcgtttatttcactattatttttaataaaaacattcggcatgatttgaatttcagcatctaatatgatgccttgctctatgaatcctcgcttcatataatgtaatgtttcgtacgtattcatttcagcaccgtttttagtatattctcgtaaatttgcaattaatttttgaaacatatgtatttcgttattatgtttattttgtatttcactacgttctttactatgctgcatagctaattgatttttcatcatacgcatattttcaatttctctatttgcacttacttgtaaatcattgtattttttctgttccatattttttaaattattttgttgttctttatgctctatcactgtagctgcaatttcatttttatacgtttcaatcgcttgtttcttttcaaattctacttgctgactctctgattctaactgtttatttttataaaacagcacaaatgctacagctaataatattaaaatcgcacctattagcacataattcatatttttactcctttatttcattttcgattattttttataaatatatctactatagtatactatggtttcgatatagactttgtaaaagttgtatatttttaataaaaggcacctctgacggggcaccttttattttcactctattgtacaccatactgaatataactcggatcgtagtatatccattgatttgtccctaagcaaagccatccatcttgcttactccacactcgatacgattcaccctgatgtaactgtcttataacatttccatttaatgatggagcatcacgcaaatttacattatcaccagtaatagtcgctacataatgtttatactgaatataactcggatcattatatacccactgatttgtccctaaacaaagccatccatcttgttctccccaaacttcatatgtttcgccacgattcaattggcgaattacactagactgtaaagatggtccacttctcaaattcacattatctccattaattatagcaaccccgtacactggagttgcattattaggcggggaaacattacctccaccacttgctccattcccttttaaagcttctaatgaaactgcagctgatacatcacaatttcctacgcctgaaatttgtccagaatctgtgtactgccacgctgtccacgctgtccatccaccagcatcagcaggcggtgtactcgagtatttagcaatccaaagcggtatatcacttaatccgctaattccgaactcattaatataccaaactcctgtatataacattacatcttttccagtagcctgtttcacataatttatgaagcttcttgcccaattcgatatagcgttaccagttaaattactgttgctcggatctgttggtgattctaaatccagaactggcattaagtctgtctggttattttgtaatatacccacaaaatattttgcctctgaaattgcatcattttgttctgggcgtgcaaaatggtatgcaccaattaatacattcgcatttcgtgctgcttgtacattcttagtaaaagtaggatcaatgtagtttacaccttctgtcgcttttgcatacgctgctggaattccagatgccttcactgcattccaatcaatattcccttcccaatgagacacatcaataaacgtaacatttgaacttgatctgttttgcatataaaatctcctatcaatttttttacttcgtatacatacaatatgtacaagtttcataagaggacacaacatttatgctatagaaacaaagagtaaacatatgttgtatacaaaataaaaaagaccttgtattacaaggccttttgcaaactcactttattttgtagcaagtacatattataatacaaaccttgctcacttagtaattcttgatgtgttcctctttctactatctctccatcatgcatcacaaaaatttgatctgaatcttgaattgtagataacctatgcgcaatggctatcgtcgttctaccttttcgcatttgttgcaacgctgtttgaatagcctcttctgtttctgtatcgatattagctgttgcttcatctaatactaatactttcggattcgttgctatcgttctagcaaaagcaattaattgtcgttgaccgcttgaaaatgctgcacctctttctactacttctgtttcatactgttttggtaacttttcaataaacgtatttgcttgcacaaatcgagcagcttcttttacttcttcatccgtaatttcttcattatacatacgaatattttgctttacatttccagcaaataaaaatgcatcttgcaatacgagtcctattttctttctaatttctcgttcttcaaatttttctaaatctacaccgtctattacaatatttcctgacttaatattataaaatcgcattaacaaattcataatcgtactttttccgctaccagtatgcccaacaaaagcaaccgtttgcccttgtttcacgtgaaatgatacattttttaaaacgtcacgctttccatcatatgaaaaagtaacatttttaaattcaatatccccatccacaacttgaggattctcattgcctttttgaaccggtgctaaatctttctcgtccattaaatgaaatacacgtgatgacgaaacaagtgcctgttggaaaaaggacaatttcatcatcatctcatttacaggttggaagaaacgatgtatatagttaacaaaagcatataaaactcctacttcaacagggctctttaaagcatcaatcccaaataaacctagtactaacgcaatagctacaatatgcactaaatccgtagctggtcgtaaaagtaatgcgtctaacttcaaagtacgtcgccctgcactataatgtttattattcacttcttcaaactcttttctcatacgtttttcttgtctgaacacttgaacaatattcattccttgtatggactcgttcaactttgcatttaacacgcttagttgattacgtacttctaaataaaaagctgcacttttccggcgatataataccataatcgcaaacattatcggaattaatacgagagaaaatagcgctaattttacatctaataaaaacatcgctactaaaatacctactaaaaagactacatttttcacaaatgttgataatacactaacataaaaatctttaatcgcttccgtatcatttgttatacgcgatacaagtgtaccaatcggcgtacgatcaaagaaacttaatgacagcttttgaacatgttcatatacttcaactcgcatatcttgaacaatcttaaaagcaatgttctgaaagtacaatagatttaaatacgtaaataatacttttaataaatgagcaactatgtaaattacaaataaagtaacgagcgctgatcgttcaaaatcccgcggtactaggtgttcatcgaggaattgtttaattaaaaaaggacccatcatttccgttactgtcgcaccaactaaaaagataaatgctaaagatagcaaccctttatatggcttcatataggaaagcaatctacttaaatcacttcgcttcttctctaccatcatacgcctcctttctcgactaaagcttctaattgctggctttcatacatttccttataccagccgttttccttcattaattcctcatgtgtacctctttgtacaattctaccttcatcaacaacaagaataagattggcatgctgaattgcacttaatcggtgtgcagtaataatcgtcgttttccctgctctttccctctttaaggcacttaaaatcgtctcttctgtttttgcatctactgctgataaacaatcatccaaaattaaaatttcagcatttgttaataaagcacgagcaatagagattcgctgtttttggccaccagataacgaaacacctctttcccctactactgtttcatatccttctgaaaattggaggatgtcattatgaatacaagcaatctctgcagcttgggtaatttcattatatgtagcatccgcctttccaaaggcaatattctcaccaatacttgctgagaataaaaaatgatcttgcggcacgtatgaaatggcagaacggacaccatgaagtgttatatctcgaatatctcgctccccaatttttaattcaccattaaaatgatcatactcacggattaaacattttaataaagttgttttccctgcgcctgtacgtcctacaactcctagcgtttcgcccttcttcaaatcaaagtgaatatcgtttaaatgtaacaattcatttttcttatacgaaaatgaatcaacggcaaacgaaacattaccgctcgctattgtctgtacagctttttcgctatttactacatctgatttttgtgaaagaattttttctacacggtcatatgaagcacgcccacgctccataatattgaataaccatccaaacgctaacattggccaaacgagggtacctaaatatgtcgtaaatgtaacgagatcacctactgttaattcacctcttacaactaataccgatccataacatactgcgattaaaaaagaaaatccaacgataagagagattgtcggatcaaataacgaatcaatacgtgcaactaacacatttttatttacaacatcttctgattttcttcgaaacgcctgcaaatcttctttctcttgtccaagcgagcgaatcactttcattccactcatactctcttgcactttatcattgatttccgaaaacgattgctgtgctttatgaaaccttttatgtaataaagttccataataatttgtcgaaatagctacaatcggcattggaattaaacttaataatgttaacttccagctaattgtaaaacccatcgctacgagtacacatcctccgacagctaatgagtcaacaagcgtcaaaacacctgctccagcagtttgctggatcgcttgaatatcattggtcgcatgtgccattaaatcacctgttcgatttgactgatagaaagatggactcatctttgtaaaatgttcatataaattttttcgtaattggcgagctaattttaatgaagacccgaaaatcataatacgccatatgtaacgtaatatgtacatcgtaatgcctacaattactaatagtacaacccattttagtaacttatcggtcgtcaatgttccatcattaatttcatctacaacgattccaattacttttggtgctacaagttctaaaagtgcaacgccaaacaataaaataattccagttatgtacgctcgtttttcttgtttaaaaaaccacgctaaattcataaacactttcatttttttcctcctcccttaaaatgagcgatgttttcagtttaccaaaaatacagaatttttaaaagttttaaaaactataactaacaaaaagaaagacactcttagcgagtgtcttttagcgagtgtcttttagcgcttatttcatttgttgcttgttcattgcgctcatcatttgattgattttcttttgggaaggtttttgtcccatttgcatcatcatcatttttaacatttgttcgttaattggtggatttttttgtaagtaattcatcatatatttgcgggcaatgaaaaatcctaacgccacgcctgctactagtgctactacgcccactagaatacctaaccaaattggcatatattttcctccttcatgttgtctaccttacagtgtactaaaaccttttcaataagacaagatacaattcgacattttttacacatatgttcgtacttgttttagaggattcagccatccgtactttgtattttcataatccatagctaaaaatgttaattcacactttcttaacacctcaaagaatgttgtttccatagagacatttccagaggtattcatacgaatatagtgcggtttcaccattatttcgccgtactccgctcccgtataaagtgtatgtgtatgatgtgttctatcatatttaccaagaacgcgcaaagcttgttctaatttatgatgaattttcattacttgcaatggcatcgttatatacatcatttgcttatataacacttttttctccgaaagggacccagattctgaaaatcgagcaaataaatcaaaaaacaaatattcacgaccaaaataagctttcgcaatatcctcttgaattaaatacaattcatacgttttcatttttccactcccaatctggacaaccttttctcttcattatatataagaaaatttgcaatgattgtctgactgcggagagataaaaaactttttctgtcgaaaaaactcatttacatagaaaaacctctccatgccggagagatttttctgaaatcattaaagcatttcttttactttacgaacaacgttctctacagtaaatccatactcttccataatcttctcaccaggagcagaagcaccgaatgtatcgatacctaacacatctccttcaagacctacgtaacggtgccatccgaatgtagcacccatttcgattgcgaaacgttttgttactgcttttggtaatacagattctttgtactctgcagtttgagcttcgaagcgatccatagatggcatgctgacaaccgctgcgtcaacgccgtctactgctaatgctttttgagcttcaacagctaggcttacttcagatccagttgcaagtaagattacatcagccgtttctttcttgcttgcagaaactacatatgcaccttttgctactttttcatacgtatcatcttttgcaccttctaatgttggaaggtcttgacgagttaatactaaagcagttggtttgtttgtagattctaaagcaagtctccaagctgcaacagattcgttaccatcagcaggacggataacagaaacgtttggcattgcacgaagcgctgctaattgctcgattggttcatgtgttggaccatcttcaccaacagcgatactgtcatgtgtgaatacatacgttactggcaattgcattaatgctgcaaggcgaattgctggacgtaagtaatcagagaatacgaagaacgtaccaccgtaagtttttaaaccaccatgtagtgcaataccgttcattgctgcacccattgcgaactcacgtacaccgtaccaaatgtttttaccgctgtaatcatctcttgtaaagtctttttcgttattcatgtatgttttgttagaaccagcaaggtcagcagatccaccgaagaatgatggtacagactctgcaattgcattaattacagcaccagaagaattacgagttgctgcttttgatcctaattcataagttggtaggttttgctcccaaccttctggaagttgaccgttcattgctgcttggaattcgtttgctaattctgggtatgcttgtgcatattcacctagcatcgtgttccactcagcttgcgcagtttcaccaacatcttgtactgttttacggaagttgtcatatacttcttctgctacgtggaagtcttgctcagcagtccaagcatatgcttctttcgttaatttcgtttcttctacaccaagtggagaaccatgtgaagctgattttcctgatttgtttggagaaccgaaaccaattgtcgttcttacttcaattagcgttgggcgtttttcgtcagctttcgcttcttcaattgctttcgcgattgcttcaatatcgtttccatcctcaacacggattacttgccatccgtatgctttgtaacgatcttctacactttcagagaatgaacgatttaaatcgccatctaatgaaatatcgtttgaatcataaagcacaacaagacgacctaattgtaaatgagcagctaatgaagatgcttcagcagaaacgccctccattaaatctccatcaccacaaatagcgtatgtataatgatctactacactatacgcatcacggttatatttagcagctaaatgtctttcagccattgccatacctacagcagttgcaataccttgtccaagtggaccagtcgttgcatctacaccagctgtatgaccgtactcaggatgtcctggagttttgcttccccattgacggaagttctttaagtcatccattgttacatcataaccagataggtgaagtaggctgtataataacattgaaccatgacctgcagataatacgaaacgatcacggttaaaccacgttgggttatttggattgtgtttcataaattgagtccataatgtataagccattggtgctgcacccattggcattcctgggtgaccagagtttgctttttcaatcgcatcgatggataatgtgcgaatcgtgttgatagaaagttgttcgattgaatgtgacatgctattcttcccttcgcttatattagtaaacgttttatacatttatatgatagcttcccacgcaagattatacaacatgtatcgacaaatatgttgatatttttttggttttttataaaaaaatcaatgttcccgggaatgtatgggcattcaatatgacatactttttcattatttttattttaaaaagaaagggaattatctgtatatttatacaaatttcttctatacttactttttttaatacgtttttaaaaacacaaaaagcatctaacttcgatgcttttcaaataagttaaacaatccgtttccgaatcgagcttgaaatcaaatcaattataattaccattaaaataatacctaataaaataatcccaacacgagaccaattccgtgaactcagcgcaaaaattaaaggtgtaccaatccctcctgctccgataacccctaaaatcgcagcggatcgtacattaatttcaaatctgtataacgtatacgatagaaaatctggtaacacttgtggtaacaccgcataccaaagtatttgaaaacggtttgctcctgttgctagtaacgcttccgtcggtcctttatctatgttttcaattccttctgaatatagttttcctaacattccaatagaatgtaatcctaaggctaatactcctgcaaaagagcctggaccaacagcttttataaataaaagagccataactaattcaggaaacgtacgaacaaaactaagcacaaatttcccagatcctgaagttaattttccaatactcatattcgttgccgcccaaaaggcaaacggaacagataaaaatgcagaaataaatgtacctaatatcgcaattgccaacgtatcaattaatccatgtaataaatcttcaccatctggcaaagatacatacgaccagtctggatttaatatccctgtcataattgctttcgtgatttcacctgctgtgtcctttatcccttctaatggtactcctgaaaaggcccatacatatacaactgtaagtgctattaaaataatccagcgatatatactcggtttcttcggttttggcacaatcatcgtcgttctattcattatagtttctcccgtaacaatgtactaatgtagtcaattaacaaaacaacaataagggtataaataattatagaagcagtttgtttatattgtaaaaatccaagtgtacgatcataatatagtccaataccacctgctcctactaaacctaaaacagctgctgcacgtacgttcacctcaaatgtataaagaacataggagacaaaatgtgctttcacttgcggaattaccccataaacaatccattgcaccttattagctcctaccgctgtcatcgcctctaacggacctggatcaattgattcaattgactcatacaacaatttcgctacaagtccaattgaaaaaaaagtaagagccaaaatacctggaagtggcccaattccaaaaatcgctacgaaaattgccgctaataataaatctggtatcgttcgtatcaaatttaaaatcattcgagctagactgtataaaaatgtgttagtaaacacattacttgctgcaaacagtgcaagtggaatagctaaaatcgctcctaaggtcgtcccaataatggccatacgtattgtatctaacatcgctgttgtaataacttgaaaataactccaatcaggtggcaccatctctttcaatagatctaccatattgggaaaaccgtctaccagttttgaaaatgatgcatctacttgtacactactactccacagcattaaaataactaaaataaacgttaacatatgtttcaacttactcggcggcttcggtatcgatttcgaatatatcgttacgtcactcatttaactgccacctctaacaattcatttttctgtgctacatctccataaatttcagcaaatttttcatctgtcgcctcttctactgaaccatcaaaaacaatttctcctgcatgtaatccaataatacgtgtcgcatattgcctagctaaatcaatagaatgcaaattcacaattgttgtaattccaaaatcttcattgatttttttcaaatcatttaatacttgctttgtcgtaagtggatctaacgatgcaacaggctcatctgccaatatgatttttgcttcttgtgccaatgctctagctattgatacacgttgctgttgtcctcctgataattcatcagcacgtgcatatgctttttctaaaatattcactctttttaacgcttgaaatgcgagctccacatcttctttcggaaacaaacctaacgttgtacgtaatgtggaatgatatccaacacgaccagctaatacattttttaatactgttgatcgctttacaaggttaaaactttggaagatcataccgatatcccggcgcatacgccttaatccttttcctttcgcagcagtaatagactcaccttcaataatgatttctccttcggtaatctcatgaagacgatttacggatctgagaagtgtagattttccagctccagacagccctaccattacaacaaactcacctttttgaattttcaagtttatattattcaatccttttgtaccgtttggatacactttggagacatttcgaaactctatcacacatcttacctaccttctatgtattcaaaacggcaaactaactgaaaacatcccctttcagctagctgccatttccatatgtattattgcgtttttactttcttcccatattcacgaacgatatcaaatttactatcatcagatttaacatatccttcatgtgaatatacttctttaatgattttacggccttcctcattctttccaatttcaatgaaagcatcttgtaatttcttgctccattctgcatctaaatcagatcgtacagaaattgtatcgttcggaattttctcagtaaatttcactattttcgtttgatcaaatatattcggataatctttttttacaatattacgagcatcttggaatacaacagccgcatctacgtcaccatttaaaagagcaataagcgactgatcgtgaccttttaatgtaacaggtttcacatcttttaacggatcaattccctcttttaatagaacagctgcaggccacacatatcccgctgatgacgttacatcttgatagccaatttttttaccttttaaatcttttacactattaatatttgaatctttcttaacaacaaactcagatttataataatctactaaatcttttgtaggggctcctgtttcattctctactccaaaacgttgtgcttgtaaaattacatttgcagccttcttttcatgtgctaatacgtacgctgtcggcggtaaaaatcctacatctacttgtttagatgccatcgcttctacaattgtattgtagttcgttgaaatactaacttttactggaatatttaacttatcacttaatagcttctcaagcggttttgccttcgcctctaacgtatctgcattttgagaaggaacaaattgaacatttaaagtcttcggtacatacccttttttcgtatcttcatttttacttgcgcttgattccttcgttccacagccacttaataatcccgctgctagtacaactgttgtgctcattgcaaaaacttttttcaacatattaatgcctccatttttcattgttataaaataacctttcataaacatgaagaaatatatcacatatttttacaaataattgattatttacagaatctttacacattctatacactcacattaaaattctcttcacatatttgatatgatgaattggaagataacaatagaaaaggtgagtcatattggaacaaaatcaaactgtaactttaaacatcttattaacaagcgatatacatggcactgtttatcctattcactaccaagataactccccagcagaacttggtttagctaaaatttctactcttataaaaaaagaacgttcccaaaatacaaacgttcttttaattgataatggcgactttattcaaggaacaccatttacttatcattatgttacatacgaaaaaaacaaaaaaaacccaatgtccttattagcgaattacttacagtatgacgctgcaattatcggcaatcatgaatttaattacgggatggatatattaaataatgctgtgactactgcgaacttcccgtacctatcagcaaacattttagataaaaacataaagaaaccttatttcggaaaaccttatataatcaaacagattgaatccaatataaaaattgctattttaggggtaacaacacatgcccatcaacttaagaatttgcactacccccaagtgtcaaaaaacgttattcgaaaatgtacatatttattcaagcgttaatgtacatatttaagttagcatttatatgcgatatggagtttggaaaaagaagaagcttttttaagaaaaatgcatcaaaaaggatgggctttacaaaagtataatgtaatgtatacgtttaagaaaactgaaccaaaagatgtagtatataaagcggattttagactggattataaagattcaaaagaaaaacaaaaagaatatattgaaatatatgaaatgtgtggatggaaacatgtaacgagttttgcgaagtggaattatttttgtaaagaagtagacgtggaaaatgagttacctgatatttattcagacaaagaaacgaagatacaaaaatttgttgaattgatacagttcgttgcaattatgtttgtaatgttaattccagtgctttacttatgttttcttggagtatcagaatcaggattatataaaggtatggttgggtttttagtttgtatatatttatatgcgtttattaatttatttaggaagattaaaaagttgaaaaaggaaatattttaacaaagagtgatattcttagagaagattattgatgggaatcaacttctctaatttctatatatatttattttgttcattcttttttatataataaaagaccaactttttaattcatagaactaacagttacaaagataatataccataataccagtaacaacacctaaaaaaatcataaatgaagaagaaataatcaataataacgaactagcaattaatattaatttaatagatttttaatttttaaaatggtagtaaagtaaaagactataaatagtagaaacaaaccatattgttagaccgtaaggagtcgttattttctcccaatcgaagatccaaaagtaaaagatgactatatgacaagttaatagtagaaatattgatggaagcgttatttttttattatttgttttacctcgcttatgtaaacattcccaaaagagtgcgaagtttaacatataataaggaagaaatccatttttaattaacttattaaacgaaaaaatcccttatagaaaaatctatttctataagggataatcatgtttttattagaaagactgattttgagcaggtttaataaattgttctgggttttcaacaagcccacatacagcgcattggacgcgataagtaggtccttgataggccatatgaaaagcattcatcgtttcatttgtgtattcttcttctacttgaccagtttgtggatttaatttgactggttttacttgttgctcaagaatattaaagcgggtacggtttgttttacaacttggacatagcattggttccatatgtatacacctccatttgtatcatttcttaaaatctttaattttatgcaagcaaaaaactttctcaatataaataggtgtttaatgtatttaaaattcagaaaaaataaaatataataaaagtacgaactggttatgtccaaaccaaatctcctgttttatgccaataagctggggggccgagaaatcggcctcatttttttgtgctcgttactataagaaacaaggtttttatgagacatttgtcgaaattttagggatggatataaagggggatgtaaaatgaatttaaaaatgaagtacatcattttatatgtagaaaagtttgaggcatgtttaaggttctataaagatattttacagttacctataaaagcagagcacggaacatatattgaatttaatactggaactaccattttagcgatgaatacgcggcaagatgtgaaagaattaacaggactaccgcttacagaaggtgaattacagtcttctcatttcgaattaggattcgttgttgagaatgtacaagaaacgattgagcaatttagagagcaaggtattaaaattttagtggagccaattgtgaaaccgtggggacaaacaattgcctacattgccgatccagatgggaattatattgaaatttgcagttcattagaataaaaggagaaaaagagatggggtttccgagactagaaacagaacgtttacaattaagagaactaacactgttagatgcagaaacaatgttccgttatttttcaaaagaatctgttatacgttatttcggaatggattctttcgaaaatatcgagcaagcgaaaacaacgattcaaacgtttaaaaatcgttatgaagagggcagtgtatttcgctggggaatcgagaaaaaagggacgggccaattaatcggaacgtgcggatttcatttaattaataatcatcataaacgagctgaaattggttatgaattagacgatacatattggggacaaggatatgcatcggaagcgttacaggcaattttaacttacgggtttgaaacattgcaacttattagagttgctgctgttgtatatgtagaaaataaagcttctcaaaaattattaagtaaagcaggatttcaagaagaaggattacttcgaaaacatatgattcaaaatggagttgctcatgatactattttatattctttattaaaagaagagtggaagaagtaatgagtacaaacgaacttataacgattatgaagaagcatagggaaaatagattcattttaggtatagatggtttaagtcgatctggaaaaacaacatttgtagccaatttaaaagaaaatatgaaacaagaaggcattccgtttcatattttccatattgatgatcatatagtggagcgtaataaacgatatcatactggatatgaagaatggtacgagtattattatttacaatgggacattgaatggttaaggcagaaattttttcaaaagctacaacatgaaacaaaattgaaattacctttctttcacgaagaaacagatatatgtgaaatggaaaaagtacagattcctattgtaggcgtaattgttattgaaggagtttttctgcagcgaaaagaatggagagatttctttcattatatggtctatttggactgtccaagagagacaaggtttctacgtgagagtgaggagacacagaagaacctttcaaagtttgaaaataggtattggaaagcagaggattattacttagaaacggaattgccgagggatagggcggatttagtcatccaatgatttgaaaatagaaggtgaatagaatgaatattttatgggattttgatgggacgttatttgatacgtatcctgcatatacaataatgctttctgaaatattaggtgactcagtagaaaaacaagaaatatacaaaaacttaaaaatatcatactctcatgcaattcagtattataatatttcatgcgagcaggaagaaaagattaaagttttgaagggaaaattcacgccaaaagatatgaaaccttttgcaggtgtcgaagaggttttgaaatttgcagataaaaatgtgattatgacccataaacatagggcaggagttatggacattttaaaatattacggctgggaaaaatactttgtagatatggttacaattgacgatggctttccccgaaagcccaactctttagcttataatcatttacataaaaagcataatattgatttagctattggagatagagaattagatttattacctgcaaaagaattaggtatttcaacatgtatgtttcaaggtaattgtgatgtagcggattattctttatcacattactcggagttttttaagatagtgagtgatagagagttttctttataaaaaaagttattaataaagactgaatcttttattttaaaggtacagtctttattttttagaactctttcattttattccgtaataacgggcagcctgattgcttcaactaataatcagtggagggtgaacaaaacctccactgattaaagtttcactttattttctgtatataataattactagagattaaaggataatcgtccatctttattaaggaagtggccagtttattttaactaaattatggttattcatgttaatatgcactcatagctatatagaaggggtggggttagtatgaaaactgaaatagttcctaaaaagaagtacagtataataagctatgtatctttactcatcggcattctgtgttttctattcgtttttataacgccaacaaggatagccaatgcaggtaatatagttggggattatattacaattgcccttacaggtgtaggtatcatgctttcaataatcacaatgacgaaaagaacagagaagaagggaattgctattctttcattaatactgtcctcatcattttttatattttggatcatagcaattatcctattgtttactggccaaattagttttgcgccgtaatgtgtaataaaaagagtccttctcgtatgaaggactctttttactcggtatcttcaggttgatattctaaaatatcccccggttggcattctaatgctttacatattgcttctaaagttgaaaaacggactgcttttgcttttccatttttcaagatagaaaggttagccattgtaattccaaccttctccgaaagttctgttacactcatttttctttttgctaacattacatcaatattaataataattgccatattattcacctcagaccgttaaatcattttctgattttatatctatagcatcttttaatagtctttggagaacggcagcaaagaccgcgattaccattgaagcaaaaatcataatcatcccgataataataatgccaggggcgtcatctctctctgccacgagatagaaaagtagcatacctaatacatataatacactaattgccaatgcgctgtacttaatattttttaaagcttgaacagatagctctgagaatgcgttatttttatcaatatagtttaaaagcttaaatgtttggtacagtgcgaagtaataaggtattgctgttgcgtataaattgataaatacaagatatttaatatatgcaatatctggatataattctgcggcgaaatttcctattttagggactaaaaaaatgcacatagcaagaacggggattccgatcagaattacaacggtctttaaaaagagtgtggatccttgtttcataaaaagcacctcatttatttaatatcttattaatttaacatgaaatttattgtttaacaataaatttttatttcttttaatcgaggatttattgttaaacaagtaattaatgaaaaggatgttaaatcttttttataagataaatgatacatatcgatatttaattaaagaaagagaaagtaactattgttagctttatgagaattgggaactaataaaacatatgtaggttttggtatggaaaaggaaataaggtgtattgaaatgaatgcaaagtttatggaggaacaatcatgttgaattatggtgtgaagatgaaaaagttactattagtgggagctataatagtaagcgtattaagtacggaaagtatgatgaattatcattcggccaaagctaaggtgaaaaaagtagaacaccagcctaaaaatataattatgatggttatggacggaacgagttcaacggcgacaacattggctcgctggtataaaggggcaccgcttacgttagatcaaattgtaacaggaggtgttcgtacgttttcggcggaatcagctattacagactcggcgccagcagcaacagctttagcaactggaaataaatcgaattcaggatatgtaggtgtattaccttctattgtaagttcgcctagcttacagccaataaaagaagaagacaagttacggccggtcgcaaacgtattagaaggcgcaaaacgtactggtcgtgcaactggcattgttgctacatctgaaattcagcatgctactccggccggattctccgctcaccatgtcaatcgcaaacattttgacgtaattgcgaagcaacaagtgtatcaaaatatagatgttgtattaggtgggggaaaagcggcactgctacctataaaaagtaatgggatccgaaaagatggtgaagatttagtaaaggtgattcaaaacaaaggatacgactttgttgaaacgaaagatgcgttattgaactccaaatctaataaaatttggggctctttctcacatcatgctcttgcgtttgatatggatcgtatagcaacaaatccagaacaaccaacactttctcaaatgacagaaaaagcaattcaaacattatcaaaagataaagatggcttctttttattcgtagaaggtagtaagcctgattgggcagctcatgctaatgatccaattgggatgattagtgatgtattggcatttgatgaagcggtagcaaaggcgttacaatttgcgaagaaagatggggatacgatgctcatcgctttaactgatcatggtaacagcggcatctctatagggaataggaatacgaaaaaaggatacaatactacaccggtttctgcatacattgatccattgaaaaaggcgaaaatgacacttgaaggaactataaataaactgaaatctgatttatcaaatgtagaagatgtagctaaactatacggtttggataatctaactcatgatgaaaaagaaaaattaaaagtggcaaaaaagaaaatggatgtaggacgaattcttactacattattggctaatcgtgcaaatatcggctttacgacaggaggacatacaggtgaggatgtattcttacattcttatggacctcaaaaaccagaaggcttaatccaaaatacagacattgcgaagacgatggcgaaagcgatgggctttaacttagaagaagtaacgaataaaatatttttagagagtgaacaagcctttaagaaaatcggtgcaactgtaacagccaacaaaaccgaaggagcaaacccgttactcgtagtaaaacataataaagtagaagcacaattatttggtaacaaaaatataattcgtatcaatggtaaagggtatgaattaagaagtattattgtagagagtaatggaaagtgctatgtaccagaagaagcaattcaactatttgtaaagcattctcgttaaaaaattgccaaccagttaagctaactggtggcaattttttgtgtttattctaaatataagtgttcgaattgttttgtaaagttttccatatgagacttgtataaatgttaaagggaaattatatttttttcttacattaaaaaatttcgttttgtagaataagaagttatacatatagtaaagtctaatgtgttatcaattaatatttacgaaaaatatattaatactttagaatttctttaatgttcattattttttatttaaggttatccgttatatttataatatgtttatttcaatttattgtattgaagctcagttttatataattataaagcaatcatcaaaataaaatctccactagagtaaatttattatttttttgcggaaattattatgcagctaagaaaactgtaatttattgaattagaaatatattagaatttagttgaagaaagagagagggaataaaatgaatatagtgcacttacgtcctaaacagcggtctaagtatcgcattatgctagggaagtggtattactctacaaagaggtacattcagtggttagcagacggaaaaacatatgcaaaaaggtttcaacaagaaaagctaccttgtacagcaattcagcaccgaacgatattacttcgtaagctcaaagatgtagatatgtggtatcaacagaataaggttgttaatttgaaaattgctgttaaaaaactaaatggtatcgtcattagaccgggagaaacattttcttactggcgtttaataggtaagccaacgaggaaaaaagggtatgtagaaggtatggtattacattacggatcttttcaaacaggtattggaggaggtctttgtcagctttcgaatttaatatattggatgactttacatacaccactgacagtaacagaacgatatcgtcatagctttgatgtctttcctgactctaggcgcactcaaccgtttgggagtggggcgacttgttcctataactatttggatttacaaattaaaaatgaaacggaccaaccgtatcaacttcacctttatatgacagatgaacatttagttggtgaatggagaacagtctatccgcaactttatcaatatgaagtgtatgagaaagaacactcaattcaacctgcatactggggcggttatatacgacataatgtgattcaacgtaaagtatataatcaacagaaacagttaatagaagatcaatatgtaacagagaatcacgctataatgatgtacgaaccactattagcttgtaataatgagaatagtgagtaatatggtaatccatagattaaatagtatagaaaatatttaattcttatttttattaaaaaagcatgaatcccagatttactgggttttgattgtaactaagaacatataaaagttcactgttatttataggagagtctgtttgtttttatatcttatgtatttcaccctgcataaaaaaatatttctcaacattttatttgttgaaaaatattgaatattcgtattataacgaatattatgttgttatcggcaaaaaacgataatttgcagacactggggaggaaatacattgaaaaagaaaaagaaattaaaaccattagcggtattaacaacagcagcagtactaagtagtacgtttgcttttggaggtcacgcagcgtatgctgagacaccaacatcatctctaccaatagatgagcacttaataccggaggagcgtttggctgaagcgctaaaacaacggggggtaattgatcaatctgcatcacaagctgagacttcaaaggctgtcgaaaaatatgttgagaaaaagaaaggggaaaaccctgggaaagaaatcttaacaggagatagtcttacgcaagaagcctctgactttatgaaaaaagtaaaagatgcaaaaatgagggaaaatgaacaggcgcagcagcctgaagtaggcccagtagctggacaaggtgcagcattgaaccctgggaaattaaatggaaaagtacctactacatcagcgaagcaagaagaatacaatggagctgttcgaaaagataaagtacttgttttacttgtagaatttagcgattttaaacataacaatattgatcaagagccaggatacatgtattctaaggactttaatcgtgaacattatcaaaaaatgttatttggtgatgaaccatttactttatttgatggatcgaagattaacacatttaagcaatattatgaagaacaatctggtggtagctatacagttgatgggactgtaacagaatggcttactgttccaggaaaagcatcagattatggtgctgatgcgggtactggtcatgataacaagggacctttaggaccaaaagatcttgtgaaagaagcattaaaagcagcggtagcaaaagggataaatttagcagactttgatcaatatgatcagtacgatcaaaatggtaatggaaataaaaacgagccagacggcattattgatcatttaatggttgtacatgctggtgttggtcaagaagctggcggcggtaaattgaaagatgatgcgatttggtcacatcgttcaaaattaggttcaaaaccatatgcaattgatggcacgaaatcttctgtttcgaactggggcggaaagatggctgcatatgattatacaatcgagcctgaagacggagcagttggtgtgtttgcacatgagtatggccatgatttaggcttaccagatgaatatgatacaaagtactcaggacaaggtgaacctgttgagtcatggtctattatgagtggtggtagctgggctggaaaaattgcaggaacagagccaacgagtttctcgccacaaaataaagagtttttccaaaagaatatgaaggggaactgggcgaatattcttgaagtagattatgacaaacttagcaaaggaatcggtgttgcaacatatgtagatcaaagtactacaaaatctaaacgacctggaattgttcgtgttaacttgccggacaaagatataaaaaatatcgaatcagcgtttggtaagaagttctattacagtacaaaaggaaatgacattcatacaacacttgagacaccagtatttgacttaacaaatgcaaaggatgctaagttcgattataaggcattttacgaacttgaagcgaagtatgatttccttgacgtatatgcgattgcagaagatggaacgaagacacgcattgatagaatgggcgaaaaagatataaaaggcggcgcggatacaactgatggtaagtgggttgataaatcatacgatttaagccaattcaaaggaaaaaaagtaaaactgcaatttgagtacttaacagatattgcagtagcttataaaggatttgcgttagataatgcagccttaactgtagatggaaaagttgttttctctgatgatgcagaaggtcagcctgcaatgacgttaaaaggctttactgtgtctaacggatttgaacagaaaaaacataattactatgtagagtggagaaattacgctggttctgacactgcgttacaatatgcacgtggcccagtatttaatacaggaatggttgtatggtatgcggatcaaagctttacagataactgggtaggcgttcatccaggtgaagggttcttaggagtagtagattctcatccagaggcaattgtagggacattaaacggacaacctactgtgaagagcagtacgcgttatcaaattgccgatgcggcattctcatttgatcaaacaccagcatggaaagtaaattcaccaacacgcggtatctttgattataaaggattaccaggagtggcaaaatttgatgattctaagcaatacatcaacagcgttattcctgatgcaggacgtaagttaccgaagctaggactgaagtttgaagtggtaggccaagctgaagacaagtctgcaggtgcagtttggcttcatcgataaaataaggtaaaaagaagagaagctgcgataagtcggtgaaactgactgattgcagcttttttcttcttgtgaaaaaactcgctgttttttatgtacttattggaaaaatatgaagtttctttgatacataaaatgctccgtctgtccaattatagaagctattttggacgtaagaaatttgtaagtaatgagtaagaaaaaagagattttcatagtataaaatatttattatagctacttttaacacctgctactaatagtgtgctataatatgaattagcaacaaaaaggaaaggaattagaacaatgaccttagaaaatactaaaaatttaaaaaaacaagttgctccttttgaaaaatcaatgattaaaaaaagtgtttggcaactgatcaacacaatcgtgccatttattattttatggtaccttgcttataaaagtttgtcagtttcttattggttaacattagttccagcactgttagccgctggatttatgacaaggattttcattatttttcatgattgtacccattattcattctttaaaagtcgacgtgcaaatagaatagttggaacgtgtatgggtgttttaacattattcccatttgatcagtgggggcatgagcattctattcaccacgctacgagtggtaatttggataagaggggtacaggggatatttggacgcttacagtagatgaatatgtagcagcaccatttagactccgtttagcatatcgtttatatcgcaatccattcgttatgtttgggttaggcccgatttatgttttcttgcttaaaaatagatttaaccgaaaaggtgctagaaaaaaagaacgtatgaacacttatttaacgaatattttaatcgttgctattgtaggaatgctttgctgggcaattggatggcaatcgtttcttttagtacatggttctatatttttaatagcaggttcaatagggatttggctgttttacgtacagcacacattcgaggattcttattttgaagaagataaagaatgggaatatgtgaaagcggcagtggaaggaagttctttttataaacttccaaaaattttgcaatttctaacgggtaatattggatttcatcatgttcaccatttaagtccaagagtacctaactataaactagaagaggcacacaacaatacccttcctttaaaaaatgtaccaacaattacgcttgctacaagcttgcgttcactccgtttccgtctttgggatgagaaaagtaacaattttgttagctttaaagatgtcaaaaatataattaaaaataatgtttctgttcgggtgaaatctgaactataattgcatcgtatataaaattccccttaatcattttcgatttaaggggagtttttgtttaaagattagatgccagataagaagaaaaattaaatgtttcaaattgtaatggaagcagattaggaattgctagtacgtaagtacaaatacaagataacaataaatgcattatgttaacaagtggagttatcatgaattttccattacgataactgttcataaatccgacgaaaattaatagcaaaagggggatcgtacaacagtatatctaaaaaattagaaaagacttgaacggaaatttcattcatttttcttggtgttccgcattccatacacttaaataggatgcatattctaattcatctggattgtcatgtaacatagaaatgaattctaatttatttctatcacaatctagaaagtatacacttgcagcgggcatccacctttggacaattggctcttgatttccttttccttgacttcctatcacttctattccacgctcctctaaccacgctttagaagtcattaaaaactctaaatttacaccaaaagcaaaatgtctcagctcaaagtcttcgatattatttacttcccatagtccaagcatttgttttttattttctccgacccaaaagaaagccactcttcttttggagagttttcttgctaaggttaatcctagcttgttttgatagaaatttatcgctttttctaaatttcttacatgtaaatgagtttcgtatatgttctgtatcattatgatcattcctttctttcttgataactaccagttgagtaatgaatgtagttctaataatgtacagctatatctgatatacctatttattattatatcgaaattgaaatacgataaatccaactgaggtagcaagttcaaatgaaaattttactacttttgtaggagaagagaaaaatccattaaattcaggtgaactcatatttaaataataaaaaaagacaacacatgaagtgaaacgccacgtgttgtcttttttgtatcgtacaatattacgaagtttcgctaattttagtttcactttgagtgttagttgcaattcttttcttaactttaaagtgatagtaagtatagcaaaagatgataaatggtacagtacaataaatgcctagtctttgatctgggataaagataagacttactaatataatgccatacaatccaaaaccaagaattggtacaaggggatagagtggagttctgaacttcaagtcgtctaatttcccaccttcagctaaatagtgtttgcggaaaaagaattgagaaacacaaattgacatccaaacaataattgttatgactccagaaatggaaattaaccataagtaaaccgtttcagcagctacgacgcttgttaaaagagaaaaagcagaaatagctattgtcatgattaaagcgttgagaggaatcccacgtgatgataatttctttaaaaatgctggagccatttcgttttttgataaagaccaaagcattcgagtagcagcgtatagtcctgagtttgcaacagaaagaacagcagtaagaataacaaagttcataatatcagctgcatatggaataccgatattatcaaaaacagcaacgaatgggctctttgtgagtcctgcttcttcccaaggaattaaagcaacaagaacaaagattgctaagacgaagaaaaacattgtgcgccatataatatttctaatagaacgaggtaaagtttttgctggatcttcactttcacctgctgcgattccgacaagctctgtaccttggaaggaataattgactgtaaccattgttaatagaatagctgcaagtccattcggaaataaaccaccatgatttacgaaatttgaaaggagtggagctggttcgtcgccttttaaatcaataaagccgaacatagcggcgccaccaagaattataaaagctataatggcagatacttttatacttgaaaaccaaaattctgtttctgcataactacgagcagataatgcgttaatagtaaagattgtaacgccaaatattaaacaccaagcccaaacaggaatatcaggaaaccagcgctgcattgtaataccggcagttgtaaattcaagaccggtcgtattcgcccagcttaaccaatacaaccatccgattgtaaagccagttgcaggattgatgaatttagtggcatattcctggaaagaacccgaaacaggcatggctacagcgagttcaccaagacatagcataacgaaatacattaataatccaccggccataaaggcaagtacggatccaccaggtccagcttgacttattataaagccagatccgttaaataaccccgttccaatcacaccaccgagtgcaatcatgaataagtgtctacttttcatcgtacgttttaattcattgtttgtattgtttacttgcgccattgttttcctcactttcgtagttgatagaataaagtttgatgtttttccgtattatggaatgtattccgtgatgtgaaatcttgttataattttcagataattaaaaagaaaagtcaatatttttttgtttgcgttttcaattcgttgttagtgatatatttttattgttagaaaattgaataaatatattgatttcatttcgaatgtttgctaaattgatagttaattaaacgtactaacatactacgagtaaagttgaggcgagttatggtacagtccattgatcgagcgataagtattattaaattattgaattctacaaatgaaaaagagtattgggctatttctgatatagctgatggaacacatctcccagttagtacagtacatagattacttaactctctaatggagcatgggttagttacacaaataccagagacaaaacagtacaaaattggaccaatgtggatggaaatagggttacgtcaattggagaaggtagactacagatcagttgcaagagaagtgatgaagcggttggcctttgaagtcgaagaaagtgtctatttaaatattccaaacggaacacattctattatcattgaaagaattgatagtcctttaaaaattcgagttatcgataatctaggggaacaaattccactttcaattggtgccgcaaataaaacgatgcttgccaatatgaaaacgaatgaaatggaacatattgtagaacatttactttcttcattaccagaacaaaagcaaattcttcttaatcaaataaagcaaataaaaaatgaaggatatgctgtcagttatggtgaaaaaacagaagggacagcttcagtagctgcacctattatcggatttaatcataaagtagtaggagcattaagtgttgggttaattagtcatcgtattaatgatgatcgactatcttttcttattagcaaggtaaaacaagcagctcatgaaatatcaataaaaatcggcagtacatcagaactataattttgatagctgtcgtcattttttattcatatactggaattcgttttcataatgcggaaaaatagggggatttatatgtcaaggtggcaatcaaaagaacaattgattcaattattaagcagtcttgttgaaattcctagtattacaggtacagaggctgaagtgatattgccagactttgttgtggagcaattatctgatttacagtacttcaaagaaaacccgcaccatgtgcaaaaaaatccgacgggggacggacgatattttgttacagcactagtaaagaaaagtgatagtacaaaaaatactgtaattctagtaagtcactttgatgttgtagatgtacaagattacggagtgtggaaagaagatgcatttaatcctaaaaagttaacatctatgttttattctcataaagatgaacttccagaccatgtacgtgaagatatagaacatggagattggctgtttggtagaggaacaatggacatgaaatgcggcctcgcattacaaatggcaatgattgaacaagcatgtgaaggaagattcgatgggaatgttcttttattggctgtaccagatgaagaagtgaattctgtagggatgagggccgctgttccgagactattagatttagcaagagagcataatttagattataaaacggtcttaaactcagagcctatgttttcaagacatcctggtgaccaaaataagtatatttacactggctctattggtaaagtgttacctggttttctttgctacggaaaagagacacatgtaggtgaaccttttgcagggttaaatgggagttatatggcttcattaataacagcagaactagagttaaacacagacctttgtgatattgtagaaggggaagcgagtcctccaccaactaacttacttcaaagggacttaaaagaggattattctgtacaaattccgcatcgtgcagtcacattatttaatttgtttttattagaaaaatcaatgacagatgtagtttcattgttacgtcaaaaagtaacgaaagtagcagagaaaatagaagagtcgtatgaaaaacatgcatatcgtttttctaaatataatccatttataccacctaatctcaaagtaaatgtattaacttatgaagagcttatcacatatgcaattgagcaacatggacgagaaaaaatagatcatattcaatctaatattataaaaaatagaggagataaagatgatcgtgcggtaacgattgatttagtagataaattagcgattttatgtaaagaaaaggcaccgatgattgtacttttcttcgctccgccgtactatccagctgtgagttcacgcaacaatcctttaataaaagaggtagttgtagaaatggaaaagtatgcacattacaatcataaaattacatttgaaaaccaaaattattttggggggatttcagatttaagctatgtaggcttgcagtatccactggattcaatgagttcgcttgtagacaatatgccattatgggataaaggctattcaattccgcttcaggaattagaagagtttgatgttccagtattaaatatgggaccggtaggaaaagatgcacatcaatggacagaacgtctagatgtaaactacgcatttgaaacactattagatatgttaccgaaatgcattgaaaaattattagtttctaataaaattacacaatcatagtagggaataggtaagggataaaacagaacctttaaagaagagtcgaatcaaattattttaatataattaaaaagtagaacggccaagctcaattttatatgagtttggccgtttatcatgtagtgaatttttaattaaaattatgtgaattcatagctaacgtaatctcttttatagttttattttttagtttgaccagatagttcaacagacttttgcgtacaacgctgcatagctgaaataatcgctgttcgtaatcctttttcctctaatgttgctacagcttctattgtcgttccgccaggagaacaaaccatatctttcaattcacctggatgtattcctgtttctagtaccatttttgcagagcctaacacagcttgagcagcgaatttatatgcttgatttcttggcataccatctagtacagcagcatctgccatcgcttctataatcatatatacataagctggtgaagaaccacttacggatgtgacaacatccattaatttttcacttacgatctctgtttgaccaaaactattgaaaatgtttagtacatcttctaaatctttttctgtcaccatttcattagggcataatgcagacattccttctccaacaagagcaggagtattaggcattactcttacaacctttacttttttattaaaggcattttcagtactttcaatactttttccagcagcgatcgtaacgatgatagcatcgtttttgattacttcttttatttcattaattattgatgaatataggtctggtttgattgataaaattaaaatatcagcatttttagctactttattgttgtcggtagttgtagttagcccatatttttcactagcattttttaaattagcagtgtttaaatctgaacaaataatttgatttgaagatactatatttttgtttatcattccgccaatcatagccattcccatatttccgcaaccgatgaatccaatttgtttatccataataactcaatcttgctccttttataatcaattatatcggtttgatattattttcttagaataagaataacatccctgtgcaatataaagaaacattctaagagaatatattcctttttgcaacactaaaagacaaaaattaattatattcgacattatgtaaatatatacactataatgtaaggttttatgtttatgaatatgagttaaacttatatcattttgtattttcattcagtagggcgataatttcatacaaataacttgtggctctatttatttttaaaaatacctcttgacaccgaatcaaactatatcgcataatataaaaaaattagattgaaaatcgttgaagggaattagtacatatgtcttcttgcgaaagagagtggaattcaccggctgaaagattcctcgtatagaatatatcgaacctatccctgagtcttaaatgaaagtttaggcgttcgcctgcgttataggcaccaagtggatatctatgtatatcaattaaggtggtaccgcggaacaatgaccgtttcgtcctttttattttattaagggcgaagcggtcatttttattttgctcttaaatacttcagtgcagcattgatgagaatagatatagttacaaagtgaatgaagtgtaatttataaaaaaactttgattttagacttgggggataaaaaagtgaaaaaacaacgaattgttgtaaagattgggagtagttccttggcagatagtcatggaggcatctctacagaacagctttcagatcacgttgccgcattggctcggttgaaagaagatgggcacgaggttgtgttaattacatctggagccgtcgctgcaggtttttcagcgctaggatatcctagcagacctgtaacgattaaagggaaacaggctgcagcagctgtcggacaaagtttgttaatgcaggcgtacacggaggaattccgtaaatatggcatcgttactgcgcaacttttgctgacgagaagtgatttttctagaaaagaacaatatagtaatgcttacgctacgttaggagaattattaaaccgttccgctcttccaattattaatgaaaatgattccatctctttagaggagctaacgttcggtgataatgatatgctgtcagctttagtaagcgggcttgtttcggcggatatgcttatgatctttacggatgtgaacgggttatatgacaaaaatcctcagaaaaatgcggatgcaaaaaaatattattttcttcctgaagttacggaagaaatttcttctcttgcaggagatgcaggctcaaaacttgggactggcggtatgaaatcaaaaatcgatgctgcaaagacagcactctctcttggtgtgagtgtatttatcggaacaggacgtggacaggaaaagtttgtagatgttttgaagggtaagggtgatggaacgtatgttggtaatgctcctcaaaaagaaatgaagatgaacaagcaatggattgccttgcattcgcttgttagcggacaaattgaagtagatgctggggcagctactgccatcattcagcatgggaagagtttacttccagctggtgttacgaatgtatcaggatttttccaagtgggtgaagttgtagaggttgtaacgcaacaagggcgcgtaataggaaaaggacaatgcacatatagtgcagaggaactaagagatgtaaaaggtatgcaaagccaagatattcaagtaagaggcgagagacatagttatgaagtcatccatagggatcattgggtttcactttaaaaaggaggaaataaaaatgaatgaagtgttagcaaaggggataaaagcaaaagaggttgctagagaacttgtgcttaaaactacagatcaaaaaaatgaagcacttgctgcaattgctaatcagctgatagtagaaacagcttatattttagaagaaaacaaacgggatattgaagaaggtaaggagaaaggattttctcattcactccttgatcgccttttgctgaatgaacaacgaattgttgatatgacagagggtattaagcagttaattgaattacgtgatcctattggagaatgtgtaagtgcatgggaacgaccaaatggactatctattcaggagatgcgcgtaccacttggtgttgtcggaatgatttatgaggcaagaccgaatgtaactgttgatgctgctacaatttgtttaaaaacaggaaacgcagtaatactacgtggtagttcttctgctatacattctaacaaagctatcgttagcgttattcaccgggcgcttaagcaaactagcttgccttcagaaagtgtacagctcatagaagatacaacgagagatagtgcaaaacagttgtttacattgaacgagtacttggatgttcttataccaagaggcggtaaacaattaattgatacagtagtgagagaagcgtctgttccagtacttgaaacaggtgcgggaaattgtcatatattcattgatgaaacagcagataaacaaatggcgtttaatattattataaacgcaaaaacgcagcgtccatctgtatgtaatgcaattgagacgattgtacttcatgagaattgggcagagcaatatggtagcgagttgttttcttccttgaaggaaagaggagtggagctacgtggtgataataaagcagtggcgattgatccttctatcttacttgcgacagaagaagactgggaaactgagtttttatctctcacactagcagtgaaagtggtttccactgttgaagaagcgattcatcatataaatacgtatggatctatgcattctgaagcgattattactgaaaacgaggaaaacgtcagcaagttttttacttctgtagatgccgcggcactttatcataatgcatcgactcgttttacagatggatccgaatttggattcggagcggaaattggtatcagtacacaaaagttacacgtaagaggaccaatggggcttccagcattaacttctacaaaatatgtgattcgtggaaatgggcaaattcgaaaataataataaaagacactcaatttaatctgtaccctttgtaaaggacattttgaaaaaagttaggcaacatcaagaagaaataccctatagaatagacttttttcaagtgtctattctatagggtacattttaattggcttgggtgtctttttttataaaaattatttaccatacaaatagcccaacgagcatagcacttaataaagaaacagccatcccgctaacaagaagcttccaaacatttttaccgatgactgatgatttttctccgccaaataatgaattgtaagttccgtaaatcatacctactgtactaaagttagcaaaagaagctagaaatgtcgttgcaaccgcaaccgtatgcggttgtaacgactttaagtttgattttaaatccatcattgcaacaaattcattcgtcgttattttgatccccattaattcagctacatacatagcatcactgcctgataaaccgagtaaaaatgcaaaaggactaaagataatggagaagattttttgaattgttaaccccgttacaaaaaatcctaaaatcccatttaaacatgctgttaaagctacataaccaattaccatagctaaaataacgataaccatattcatcccaactaacatactgtttgaaatagtagaaaagaaatcctttttttcatgttttgaaggtgtgtaaacaacgtcttcttctttcgaaacttccacaggatttaatacattggctaaaattaatgcgttaatacaatttaatggaatggcactgaaaatatatgttgctggcaccattgataaataagcgccaagaatggatccgctaacgctactcatactcataattccaaaagttaataatcgattttcttttaacacagataattgatcacgaacaaccgcaagtgcttcggtgtttcctaaaaacatcatttgaatcgaaaagaaactttctaactttggtaaacgagaaatctttgaaataactgcacctactttatcaataatccaagttaagattccgaaataagatagaatatcgaaaaaagtaataacaaaaatgataggaagtaacgcactaaagaagaaatcaatgtgctgactttccatagctgaaggaaatgcaaatcgaataccttcattcgcacatgctagtagccaactgaaaaatgacgcaattttattaatgataatactgccgagctttgtgcctaacataaaccatgtaataaaaagctccaataggatgagaattacaattggtctccattttatatgttttttattaggcgaacataagaaaacgattaatatgacaacgaaaatccctaacatattcaatatgaaatgcatgtcaacaactccttgaggcttattatttgtatataaaaaagcatctattcttccaaatttggattatgattagaagttatgaagcatgtaagttatgttaggaatcaatgtattttaatttgctttattttgagtaatcgcagtaattatcgaacaattagttgttttcaattgttttgttggatattaaacgtatgcgattttaaacatcgtttatcccggattaacgggcagtaagacttttacctcaaaattcagggaaagcaaagaagtggggatgggctgcccgcaaaatcccgattggtaagagctgattaaaatttcactttataaataagaacggtgagttggccatgaaccttgaagtttccgaagctgtataatttgtcctgtatgataagcatcatgcaaaaggatattcatatattgttgccaaactggtagagaaggacttagttgatctagttctgcttcttgaagggcggttaatgaagattgtaaggcatcatgtacttgaagcgttcgcttttctcttcaataaaccttctctatagttgaacaagagagtgaaatacaacgtataattgagccattaaaaaatctcatttttaatatgatatttaataatcaaggctttcattgagtcagaatgaaaagagtataaacctttttctgtttgctcattgattaaagttttttttaagttgcaaaacggttctaaaaatatagaaggtaaaattcgataaaaatagaatatgttatatagcaaacaaggaggggataaaaatggaggtctatcatataacgagcagaaaaagggaaacatacaacgttcaggtgaaatattcgatacttttcgagtgtgcacttggcattgcagcgattactcataaaaggttaattgatactcttgaaaagactcaaagtgaatgggaagaaattaagaaatcattaacagaagaaatgagagaacacttacagtttgtagaagaacataatacgtggaaagcgttactccagttattgtatgaagaggattttcaagatttatcgcagtttaattttaaaattgattcactttcagaagaagatttgaaatttatatgtttaccgtttttaggagagaagtatgaagagaaaagacgtttagctgcaacgggagttgtatgtgcaatacacgaactaaaggaactaacagataatcatcagtttttttctacttatattagctttatatgtaatgtagatgtacaagtgctgaaatcgcatttaatcgctgttatgacaggttggtatgagagtgttattaaaagagaggaagaacaaatactttctatattaaaacgagattatgaagcaaaaaatgaaatgaataaaaagatgaaaccagaagagtttgttgagtgggctactggtggcattaactatatgccagaaccaagtgttcattacgtgcttcttatcccgcaaatgacgtacagaccgtggaatattgaagcggatattgaagatacgaaagtatttcattatccagttgcgaatgaaagcattcatcctgaagatccgtatgaaccgaattattttttagttcaaaaacataaggctcttggggatgaggcgagattgcgaattgtaaaaatgttgtttgaaaaagaacgtacattacaggaaataacggaaagattacagcttggtaaatcgacagtacaccatcatttgaaattgttacgtgcagcgaagttagttgatatacatgacggaaagtatgtattaagaaagaaagcagtacagtctttagcgaaagaattagatatgtttttgaatagataattaacaacgagaatgtacataaagggaggaatataaaagaaaagttggtgtgtgaaattgaaaaatatattgaaaaatcgttcgtacttttttatgtggattggtagtgcaatctctgaattaggaggggctttcggaacgttatgtaattcaattctagtatatgagttaacaggatcggaaatggctttaagtagtatgtggctattatatttcatcccatcactcatactgcaattaataagtggcccatttattgataaatggagccggaagtggattatgattttttcacaatggatacgggcgtccgtattcttattacctttggtgatgctagttacaggtagtatagaagtttggcacatttatgttgttcaaattgtagtgggacttattacacctctttatacacctgcgagtcaggcaattacaccgagcattgtaagtcaaggacaacttcaagacgcaaatgcgtatattgatggaatgactcgtctcatgatgtttcttgcgccagtattgggcggagtagtcattcatttcattggaacagaacttacattatctttcgtatgtatttgtctatttgttagtggtgctttcttactttatataaaagaaaagaggactacaacagatatacgaaaaacgtggctagaacaatttcttcaaggttttacatatttttttacaaaaccaatcatcgtttggctcggtatatttcttactttcgtgcagtttggagtaggggtaacgatggtcacaaatcttccttatataaaagacgagctgttagcgggatatgcagagtacggctattttatggcaggttttccacttggctacgtaattggctcagtattagtgggaaaagtaacatataaaagccggcgtatacttatgcttggaggattgtttataggggggctcacatacatttcattagggttcaatcatagtattatcattgcaataataattgaagtaatagcagggatttgtattgcatttttcaatgttcataacacaacaatatgccaacaaatcgtcccaaataatatgataggacaagtattttcagtgcgtttattttttatacgatccgctatgccattaggtgtgttagtagggggaatattgagtgaaatgtggggagtaagagcgctatatgtaattatcggtgcaattatatgtgttacatctttaatagggatgttatttccatatttcaaatttttagatgaggcgatagaaaagaaatcagcataattcaaaaaattaaaactttacaattgaaaataattatcataatcaattataatagaagaatactagtattcgtattacaaagagggagtgggatatatgtttatcgaaacgaaaacatttacagtaaaagaaggcacatcaaatatagttgtagaacgtttcactggagaaggtattattgaaaaatttgaaggctttatcgacttgagtgttcttgtgaaaaaagtaagacgaggagacgaagaagttgtcgttatgattcgctgggaatcggaagaagcatggaaaaactgggaaacaagtgaagaacacttagctggacatagagcgggccgtggtaaaccgaagccagatcatattattaatgtggatcatgcggtttattatgtgaaatcatcgaaatcggcttatcaacagtcgtaatatataagtagaggatacatgttgtagatgctaacatgtatcctctttttgtagtaatgggggatggaaatgatggagagtttttcattcattacaaatgaaaaacataaaaaattggtacaaacaattttaaatgaatatttatttagagataaagtaaatggattcatgctaattggatctgtcgcaagaggtgacgcatatcctgattcggatttagatttctatattcttttagaagaagggcaaaagaaaaaatttcattttgaaacgagtgatgatattttagttgaatataagagtgcagattttaatcaaattcaagtaaactttaaaaacaatccgatggaattttactcatttctagaaggggaaattttgtttgataaaagcggtgagttgaaaaagttaaaggaaatagctacatatgaatttgaaaactatcgtgtttctagcgacaaaatgaagggcatttctcattggttgcatagttcattaattaaaattcaatctgccttgaaagcaaatgatgagttaaaagcttcatacatagttcaaatttcaacttggacattgttagatgggatatgggctgttaataataagcctataccaccagcgggatctgttttgaagtatattgaaacattatctaaagtaccaactcattttaaaggttttatcaataaactgtttttaggtgatacgacagaacgtacctctgcagcaattttcttgattgagtgggttttacacaatttgaaaaataaataatgtggctattttatataggtaaaataatatttcgcgtcgaacagtttatggaattacagtcataaaaaacgttctaggctatagaaaaaaatattagacttataaagcatagtcttagatggaacgcttgaatatcttgccttacatatttaagtgttatgaaaatgaatccatataccctctgtttaaaaggagatgagtacatgaagctgaatcatttaaatttatgtgttgatgatttatcggaagcgagacatttctttgaaacattttttgattttcaatttttggagcaaaaagggaaagcacttgtagtgatgagtgatgagagtggttttatacttgtactaagtgatccaaaagcatttaaagggaataaggaagttacgtatccggaagcttttcatattggttttttagtggatacatcaagtgaagtggatcaagcgtataatcgtttagtagccggcggcattgaaatagacaaggaaccttatttgatgcgaggtagtagttatggtttttattttacagtatttaatggcttattaattgaagtgtcttgtcttgattatagagaaggtaagaaagtttcaaagcttaatagtaatcatctagagtaatcatttgaaggtgtatagaatttaagtatgtatcatattagaagacggattaagaaagtttcactgtaaagtaaaaaagacagactaataaatagtctgtcttttcacattaattcttcacatcatcataaagttcaagtgcctctttcacattcaatccattttttacaatgccatgtattgcttgaatcatcgcagctgggtgctcggattgccatatgtttcggcccatgtctactccaattgcgccttcttgcaacgcattgtacgtaatgtttaatgcgtcttcaattgaatctaattttggtccaccagcaatgacaactggggcagggcatgtgctcgttattttttcgaatccttcacagtaatacgttttaataatatcagcacccatttcagcacatacgcgggaagcaagtgctagaaagcgagcttcacgtttttgtaattcttttgcgactgcggtaatgccgagtactggcaggccgtaatcatgagcttcagaaactacatttgcgagatttgtaacagtttgtgtttcatagtctgatccaatgaaaacagaaacgccgacgccaattgcgttttgttttactgcttctttcacaggtgtaacaattgtttcattcgctaaatctttaccgacgacagtagcgccgccagatacacgcataaccatcggtgtgctgcagttttcaggaatacaggagctaagtacaccacgcgttaaaaagagagaatccgtgtaaggaagtaagtttttaacagtttcaagtggctgttcaagcccgtgaattggtcctaaaaagtagccgtgatctatcgctaacattaccgctctgccatcaggtaaaattgtatttaatcgatttttaaatccccaagtcattccaaatcactccttcgttaatgttggattttccgtttgtaccgtatctttatttggtaaatgtggtgactttataaaaacagctttaaaaggtttgtcagaatggttaatcagatagtgagattcatgagggcgaacttgcaggacatcaccttgtttaattggaactctttcgttatttacatagaagtctatttcaccttctaatgcataaaagacctcttcgcacgtcgtatgataatggttttgaaactcctggcccggttgaatgacaacaaggccaagatcaatatttggaccttgtattaaatatttcggcccgtgatcaccgaagcgataggagaagtcattttcattcgcttttaacatacagttcactcctttatgtaatgtgttacagtgcaccaggcgcaatccacatatgtgaggtgagccctttatcagctaaagcgagctgactgtcatatacagttttccatgtttcatagaactctttatatagttcgtgattttcagtaactggttcgaatgtttgctcccactgtacaaactcttcggcagtttcttccatagatgaatatatgccagcaccaactccagcagcaatcgcagttcctaaagcagctgcttctttcacaacaggtacttttacaggaataccgagtacgtctgatagaatttgtggccatagttttcctttagcggcaccgccagcaaaaacgacttcagaagggaatgtaccagtaagattttcaattagttttaagtttccaagtgtaacgaaggcggcattttcttcaatagcacggaacatttccttttttccgcatttgtcagcgtctaaacttaaatttaagaatgaaggtgcggcatgacgccaagaaatgtagttcataacgtttgaaaaagtagggataatgccatgtgaaccgacaggtacgtctttcgcttgttcttctagtaattcataagcatctacaccgagtttatcagcaagtttcttttcttcttggcaaaaagcgtctcgaaaccagcgcataacgagacctgggaaaaaggcgattgtttcatattgccataggttcggaacgacgtgacaatttactcgaatcgcagcatgtggatctgttattggctcagtaacattcacttcttgttgccaaaagctacccccgcatattaacgtttgattcggtttcacgattcctgttccgagcgatgccatttgagcatctccacccccggcgacgacaggaatcccttcaagtaaaccagttaatgctgcacactcttttgtaacgttgccaattactgtaccagcttcatttactgttggtgaaaatggcaaagatagaccgcactccttagcgacatcgttatcccacactctattttgtaagtcaaaaatacctgacgtgcatccgtttgagggatcaatttgtagtacgccgcttagtttatataaaatccaatcgtttaacattgtaaaagagtaaatattattatagacgtcgggttcatgtttttttatccagagtaggcgtggtaaagcacctaatgaaaaagtttgaccagactttgtatataaatctttttcaagatgtgaccgaatttcttttaattcactaacttcgacggatgcgcgcccatcaacatttgcacacgcccatatttcttgcccatcttgatcatataaaacaaatccttctcgcatacttgtagcgctaatagcaagaatagaagaggcaggagtgttgcttttttgaagcacctctttcgtacattcttgtactagcttccaattttctactacatcaaagttcatagagcctggataacgaaggtcagatttgtgaatccattctttttgacttactgcaatttgattaccatgtaaatcaaaaagaactgctcgaatgctccctgtaccagcatcgaaagctaataaatgggacattaacaatcaccatcctttcgtaataaggagagggcagtttcctcatcggtaattaatgtatgaataaactttccttttaaggcaccataaattgcatctatcttttctatacctccagcaacaccgacgacatgattcatattgcgcaaaatagagagaggcgtgccaattagacgattatgatgcgagagctctaataactcaccattcgtattataaaactgtcctaaaatatcgcccgccccgttttgacttcgaatatatgtcatttcacgtagcgttaatttttcttcttttacaattgtagcgtcttgagataacccgccaataccgacaactgctgtatgtgcaagtgaagcgacatgaagcatatctttcacacttggttctgataaaatacttcgtgccatttcagtagaagatgctagaaaaggagtaggaataatatgaagatcaccttgcatgtagtgtaaatagttttgttttcttgggagatagtggtttactccgcctgttagcgttacgaatgaaagattaatagaactttcaaaatgaatgttttctagcattttacttatcgtttcaccccagccgatgccgagtaaatcaccttgttggagatgagtttctaaatattgtgcagcggcttttccgagagaagtagcataattgtttattggagtagggataatgaaagcatcttttaagtggaactttttcattaagtcacgttcaatgctcaagcaatgcaaaccggttccttttacgtgaaatgtaacgataccttcactgcgtgccttatctaataaccggacgactttatttcttgaaatatgaagaagtgaagcaatctcttgttgtgttaattgatctttataatagtaccaggctactttaattaataaattttcttcaaagttcagctgtgacatactcttcatccctttcaacaattgaccaatgcttaaacatatgtgtcacatattttgtttattccagttgaaacgattaatagtacattgaaaaaagtgttctagatatgaaaaaaggaatatacaatgctacaaaacaagtagaacaaataatcattttctcaaaaaatgttctgggtaaaggcaggtgacatcatgtggagaatgtgcccttattacaagtgaagaaaatgagtaaggcgttttcgaatcaacttgtgctaaaggaagtgaacttacaagtagagcatggtgatatatacgctttagttggtggaaatggcgccgggaaatcgacattaatgaaaatattaacggggttatattcgtatgatagtggagaaatgtatgtgaaaggaaagagacagcagtttgcaaatccaaaagaagcacaccaagaagggatttatttaataccacaagaaccgctcatttttccgcatatgaccattgaagaaaatatatgtattggattaaaggggaatagaaagaagcttaaagtaaaagttcagcaattaattgacagtttaagttgggatattgatcttaatgaacagggagaatcgttatctattgcgcaacaacagttagtagaaatcgttagaggattaataagagaagctgagattcttattctagatgagccaacatcgacattaacaacacacgaaattaagagtctttttgtgttgatgaaaagtttacaagaaaaaggaattgggatgatttatattacgcatcgttttccagaaatctttgaaattgccaacaaagtagcaatactacgtgatggaatggttgtaagccaaggtgatgtatgtgactatacatatgacatgctgatggagggactattgccaaaaggatataaacagaaagagaaaatagaagtagttcaagagacagcaaagacgaaaaaaatattagaagtggttgatataaatggtcacgcattcgaaaatatatcattcactgtacatgcgggtgaggttgtaggtgttgctggcattataggatctggcagaacggaattagcagaagcgatatttggattgaaaactataaaatcagggtctatcttattgggtggaaaatcaattgatacgtgttctttgcataaaaggctagacgaaggcctagtttatgtgccagaggatagagtgaggaatggaattttctcaattgcttctgttaaagaaaatattgcagcagcaagtttatatcaaaataatcgcttttttataaatcaagaaaaagaaagcgctttagttaattcgtttatagaacagttccgaattgttgtacagaatatgaataaagaattggcatctttatcaggaggtaatcagcagaaggtcgtgcttgcgaagtatcttgcatgtaatcctaaaattattattcttgatgagccgactcgcggaattgatgcgaaagcaaggcttgaagtgtatgagacgataaaaaaaatgaaaagggaaggactcgcaattttattaatctcttcagatgttgaagaaattatccaattagtaaaccgtgtatatgtaatgagaaatgggcgatttgtttctcatatggaaaaagaacaactgagtgtgaatgaagttacacgccttgcatacggaggtgtaacggaatgaaacgtatgtataaaatgcacgaaacgtctatcatactgttactactaatttatatagctactgtagggatgataaaccctagttttattcaatttaactcgttatctttactgatgaaatcaagcgttattttagtcgtgctagcaatcggtcaatcgtttgtcttatttacgaaaaatatagacgtatcagttggctcaattatgggattaagcgcggcagtttgcgggatgttgttaacgaacgggtataatgcattcttgtcaatttttgctgctgtaatgcttggtgctagtattggtttcataaacgggattggcgtcgcaaagtttcgggtaccagccattattatgacattagggatgctaggaattgctaggggggcaatgttaatcttcacaggcgggaagtggattgaagatattccaaacgattttaagcagctgtcatctatcatcattcttggtttacctataactgtatggttcgttcttattattttactactactatacttctttttaagaaaagtgccattgggaagatacttttatgcggtaggtgataatgaagatggcgcgaggcttattggtatacctgttaataaagtgaagatatatgcgtttatgatttcaggcataagcgctgcgctcgctggttgcatatttgttatgaatatcgggttcgtcccaaatcaaacaggtacaggattagaattacaagtaatggcagccgctgtactaggaggaattcatttaaaaggaggaacaggatctttatttggagctgcattaggagcgttatttttagaaacaataagtagctcactcgtctttttaaaaataccagcattttggaataatgctatttcaggttttttactattacttattatcatattagatagcgtcatgaagaggtggaaagcagaaaggaggatgaatctatgaagtatttttacagatgggaaggtgtgttaatcatattacttcttatagaattcattctctttagttttataaatagcgatttcttaaatattagtaatctcctttttagtacaaatgatttcctatttatcgcaattgcggcgataccaatgacttttgttatagtaacaggaggaattgatgtatctgtaggatcaattatggggctaacctcgattttaattggtgtgttttggatgaatgggattcatattttactagcagtaataatggcacttatagtcagttgcttagcaggagctttaaatggactcattataaaaatgacagatgtagagccactagtcgttacactcggaacgatgtttttatacggaggaattgcgcttgtcgtttcaggaggggcaggtgcttctggatatgaagggataagcggtttacctgatacttatgtacaactagcaaatggtagttttataggaatacccaatttattatggctacttattttattaacaattgtatgcacgattttgtttcaccgaacgatatatgggcgccacgtacaattaacaggtgcgaatgaaaatacagcaaaatacaccgggattaagacgaagaaagtagtaatcattgcttacatactttctgggttaggaggtggattaggaggagctttcttaactgcatatttcggttctgcacgtgctgatataggaagcgaaacaatattaccaatcattacagcagtcgtcttaggcggtacacttattacaggcggaaaaggaagcattatcggtactgtactggcgagtattttcattgggctcatgcagtatggcttgcaaatgacgggtttaacaaatgaacaatccaatgtagtaataggtattatccttattctttcagttattatgagacatttcaaattacatcaatttttagcggggaaaagacagagtttgcataagggggaaatgtcatgaagagaaaactagggattgtattgatcgtatgtatttgcctaattggtttaatagcttgttccagtcaaacggcagataagaaaaaagcggatgatgtgaaatttgcatttattccgaaattaacaggagttggcttctttacatcgggcggtgaaggggcaaaagagatgggagataagctaggcgtacaagtgaagtatgatggaccgtctgaagcgagtgtatcagggcaagtaaagtatataaataattttattaaccaaaactatgatgcacttatggtttcatctacgtcagtggaggggctatcgcaatcactgcaacgtgctaagaaaaaagggatgacggtgttaacatgggattctgatgtgaatccgaaagatcgttctttttatataagccaaggaacaccagaccaacttgctaacttattaatagaaatgacttctaagcaaattggagataaaggaaaagtagcattcttttattctagcccgacagtaacggatcaaaaccaatgggtaacgaaagcgaaagaaattattaaaaagaaatatccgaactgggaaattgtaacgacgcagtacggtgaaaataatgcacaaaaatctttatccgtaggggagaacatattaaaaacgtatccagatattaacgcagttatttgtccagatgcaacagcactcccagcaatggcgcaggcagctgaaaacttaaaaatggataaaaaagtagtggtaactggattttctacaccgaacgttatgcgtgattatgtaaaacgaggaacagtacaacaatttggtttatgggatgtaaaacaacaaggtgctctcgcaacgtatgtagcaaatgaaattgttgtaaaagggaagaagttaaaagtaggggatagcttcgaagtaaaaggaattggaaaagtgaaagtagagccaaactccattcaaggatatgattatgaggcagaagggaacggaattatcgtattaccagaacgagttgtatttacgaaagataatattgataagtataatttttagtagacaaaaaaacgtccgaatatatcggacgtttttttatttctgcattaattatgaacagtttctttttcgtttaatccaagtgtacgaccagtagaagtgtgaagatcttggaacaatcttggattttcagttagtgaaatgccatatgaaggaatcatttcttttattttttcttcccattctaccatgcggcttgggaaacatttttctaatacttcaagcatgacgtgaacagcagtagaagcacctggtgatgcgcctagtaatgcggcgattgagccgtcagctgcacttactacttctgtaccaaattgaagtgttcctttaccgccagcatcagtatctttaattacttgtacacgttgtccagcaactacaatatcccaatcttcacttttcgcgttcggaatgaattcgcgtaattcttccatacgtttttcatgtgataacataacttgctgaattaagtattttgtaagtcccatttcttttacaccagcggctaacatcgttaagacgttattcggttttacagaaccgattaagtcaagatttgagccagtttttaagaatttaggtgagaagcctgcgaatggtccaaacagtaaagcttttttattgtctatatatctcgtatctagatgaggtacagacattggcggagcgccaactttagctttaccgtacactttcgcatgatgctgctctacaactttttggtttttacataccataaatagtccacttactgggaagccaccaatatgctttgattcagggataccagtcttttggagtagaggtaggctaccgccaccgccgccaataaagacgaatttagcagtatgatgctcaattttaccactattcatatcgtgtacttttacttcccacaaaccatttttcgtgcgcttaatattttcgacactatgcttgtagtttagctcgacattttttgtttttaagtaatcaaacaacatacgtgttaatgcaccgaagttaacatctgttccagagtcaatcttcgttgccgccatcggttcattagatgtgcgaccttccataatgagtggaagccatttttttaatgtttcaggagcatcagaaaattccattccttgaaacagtggattttttgaaagcgcttcaaaacggttttttagaaactcaacatttttttccccttgtactaaactcatatgaggtagtggcataataaaatcttgtggattacgaattaatttgctctttacaagatatgcccaaaattgtcttgaaagctggaattgctcattcacttttacagccttactaatatctatagatccgtcagctttttcggaagtatagttcagttcgcatagcgcagaatgccctgtacctgcattattccattcgttagagctttcttccccggcacttgcgagtttttcaaaaactttaatttcccattctggtgctaattcttttagtaatgagcctaatgttgcactcataattcctgcaccaattaagataacgtctgttttttgctgcatgttgctcatgataatctctccatcccctatattggcaaaaaagtgtaggtgttttctatgtctaagccgtaaaagagaaacaccgcctaggccccacctaggtgtataccttttttgtctcaattatataaccatctcatactctattataataattaatagactaaaatatctagtgttatctgataattttaaactatttaacgttttattcgctaaaaatcttatttaacaagctcttttaaggtggtaaatagaaaaaaattacagtttaaaattatctcgaaaaagcttacgtatccttaagtgactaaatcgagtacctttttatgggattattctttccgtaatggtaagattattctgaaaaataaaaaggagggactctaatgtgtacaaaagaacaaatttcaaacttatttcgaaacttttcaataaaggaatgtaaagggtcaagtgatttatatgaatatttatcaatgaaaattgctgaagatgaggaagtacttacactatcgtcctatgctcagataggtcaaccagtcccaaacttactattaggtgcagtacattatttattgctagcagggaaagaacatcatttaaaaacgtattatagtagtttagttgaaaatgctgatacaaatttagataaagcttttaatcattttaaagatttctgtaaagagtaccgagaagaaatcattactttgttacaaacgaaactcgttcaaacaaatgaagtaagacggtgcgcatacttatacccaagtttctgctacatatttaacaaagtgaagaagccgttagcgttaattgaaattgggacaagttctgggttgcaactgttctgggaccaatatcgttattcgtacgggacggatgaaatgtacggaaatatagattcaaatgtgcatgtaacttctgaaataagaggggagaatgtgccgcattttctaaaagaaagcccatctgtcgtagaaagaatcggactggacttacatgtgaatgatttacataatgaggaagattatttatggttacgtgctttaatttggccagagcataaagaaaggtttgagatgtttgatcaagctgcatctttagtgaaaaatgaatctgtccaattaatagaaggagacggtgtagagctattatcatctattattgaacaaataagtgaagaagctgttatttgtattttccatacacacgtcgcaaatcaaatacaagaacaagtaaaacataagttagaaaaacaaatacaagaaattggcgcaaaacgtgatgtattccacctgtataacaacatgtgggatcgtgaccttcatattgattattatattaacggaaacgaatatcgtgaaacggttggagaaacagaagggcatgggagatggtttagctggaagattggaaatgagacgcttatttagattaataggggcgccctcacttgtaaaagaagggaccataggctcaagcattgactaaatggttaaggaataaatgtattagtaacatacaaaaaatgcttcggagaaatcctaagcattttttgaattacatttaaaccccataatggatcatgtacttctgttctgctgtagcttgtacaatttttgaagctaactcattcagctcatcagattttctgaagaactttgaagatgtaactgtttcatagaaaattgctaaagattcagaagggataattgtaatccatcaacttgtgatccgataaagagattttttaacactttttcagcgtaaattttatcctctgtattcattcttgaattcctccttttcataaaaatataccttatatttttattgtaataaataaattttcatgtaaaatgaaccttttgtgaaaaacgagcgaatatagtgtgaaggatcatgagaggggaacggagctttggatgaagtacaattaaaagaatggctatataaacgaaagtatgttgtccaaaaaagagtttgagaaagtgttactttggattgttgaatagatatttagtaaaagaattaaccaataattatattatgtaaactttatttataaaacacccatttaaaaaatggatgttttatattttaatatattaggtgtaatatatagtttaaaaaagcggaatactttgcggaaagttaaaaatatttttcggatcatatttcgcttttacttccattaatcggtcaaagttgcaactgaagtatgcatctggccaatttttaatggataggtcaggcgtattaacgtagacaccttttgtaaatggaagcatcgctaagcggaagtcttcaacccatcgaatacttccagcggcaccttctggttgctcccaagtagcgaatattgacatgtttgatagtgcttttcggtaaaagtaagcagttgcctcatttggcacctcagcaacagcaccgcctaatccgtggaaaaatacggaggtggtggaaaagggaggtgcattattaataaagtgatcgataatggataatccttcttctggtaatagttcatatacatatggaccaacacttttaaatggtaaaggtgttgcaggttgcttttcagctattttcgctgctgcttctgcccatggtatttcttcgatagttacttgcattggtgaaccagcttctagtaatggctgtagtagcgactgcaattcttgtacagaaccgagaaatacaccttgcattaataatgatggttctaattctgcagacataaaaagagtagttgtaaatcgtttattagcgcaaggtagcgtatattcttgccaagaggttaatacaggttttaaatctgatatcccccagcttatttctgcaaatcctaccgtattaattttatgtgttcgaaacttaaacgaagtacatattccaaagttaccaccaccagcaccgcgcgaagcccaatagagatcgtagttacacttggcgttagcgcgtattatacaaccattcgcgtctaccatttctaattcaagtaaatgatcgagagttaatccaaacggacgagagagaatactatgtccgccacctaaagtaacacctgcaatcccgggagtaggacaaacaccactcggcacaactaacccttcagctgcaagtgtttcaattaaagaaatatttctccatccagtcccgatagttacagttccattattgtgatctatttctaattgtttcatttcacttacatcaattacaagaccagcattactgacggataatgcctcataattatgacgtccagagcgcatgcgtataggaacgttatgtagccttgaccagcgaacagcgtttactacatcctgcgtattttgagcaaaaacaatgattaacggaaatttgttgaagaatgtattgaattcttcacgcgctgaattataatcaggatcattaggtgtaacgatacgaccagtaagttcaattttttgattattcatttcagtcatctctccttgacgtgaaatatttataatgtggaaatacagaacataaagaagaactgacaatactttataagtaaatgaataaaggaaaaggattattccaataaagaaaaaggcagtgctacataagtagcgctgcctttttggaattatatgtatgtgctcaaaatttccccaggtaatccatcaatctcacaaactttctccgatgtaaaacctacacttagtaaaattttgcgagaagggatattattcggatcgataattgcttttagtacgtttacatctgtttgcttcgctattaaagctagttgttaatttttgattatgtacgtacatacaatatgtaattaagtgaatgaccatcatagtaattacagaaaagggtgaatacagcatatgaatcaatttgagcaaatgatgtacgttggtgtcatcatgtctattgtactatctgtaatgattttagggtccttatattataatcctcgactatcgttaactgattatccgaaagatattcaaaaagtagtttttccaaaatcgattcatgaaaaaaagcaaagcatttattttaatattgtatataatactattcttttcggtagtcctttcgtttctacatatatactacataagcatgaaaagttaatgtatatggatgcctatttacacacttttggtattttaatgattttcaatttagtagatttacttataattgatttgctaattttttgctggattactccaaggtttgttgtgattcctagtacggaaggtatgaaaggatataaagattataagtttcatttaagaggggctattgttgctactcaaattttagcaatcgtaagtttatttttggcgggaattgccacaactatttagtgtgaagaagggtatggagcttttataaaagataaggagatttataatatatagaattagaaatgagaatttgatagtattggagtaaggagttttaataacagtatattaaacaatattaatataccgttgcaaatgttttgatattatgtaaaattatacaattttacggaggcatttgataaaattcaaaaaaatttaatggaggttaatatgaaaaaagtaattggcgcagcaacagcaactgtttttggattgggagcgtttaccacaactgctaccgcagaaacaatcgtaacagcagatgtacttaacgtacgtgaaaaaccgactacagaatcaaaagtggtcgaaaaagtaaagaatgggcaagagttaaaagtcataaataccgaagatggctggtcaaaaattgagttgaatggtaaagaagtgtttgtaagttcggagtttacaaaagatgtatatcatgtaacggcgaatttgttaaatgtacgcactgaagcaaacacggattcagaaattcttggcagactaaaaaaagatgatgtaattgaatcaacgcatcaagtaaaagacggatggctgcaatttgagtataaaggaaaaactgcttatgcaaacgtttctttcctatcaagtacagcaccaactgaaaagaaaactgaagagaaaacgaagcaagtagcgaaagtacaaaaatcagttaaagaaaagaaagaagtaaagacgcagaaagtagcaaaagcgaaagaaacaacgaaagcacaagaaatagtaaagcctaaagaagagttaaaagtcaaagaagaagtaaaagttaaaaaagaagagaaagcgcaagaaatagtaaagcctaaagaagaggtaaaagtcaaagaagaagtaaaagttaaagaagaaccgaaagtgcaagaaatagtaaagcctaaagaagaagcaaaagtcaaagaagaagtaaaagcgcaagaaatagtaaagcctaaagaagaggcaaaagtcaaagaagaaccgaaagcgcaagaaatagtaaaagctaaagaagaaaaagcaagagaaatagcaaaagctaaagaagaagaaaaagcaagagaaatagcaaaagtcacgggtttataggtaaatccctttcctaaaaaacctaactttatcatacgaggaggtggatttcatgtattacaagtcacctctggacaggcttttcttcaaatcaatatttcttgcaatatcttagttgataaagcaagagatagttagtttagtttttaattaatcaaataaatctattaaaagaagaggagaaatttatttatgaaaacattagaaatgaaagaattgaaaggttcaagtaaggggaaggtttcagctttattaactcgtacaaaacaatggttgaaaaatgagtcttcagatgaaacatcaaataaagtttcatggacttacattggtcttggaatggcagttgtagttttagttatcatgtacccagcattaaaatcaggtacttttaatgtatctaattactttacttcaattactggcggcgcgaagagtgagccgtctggatggtcaaaataagtttttagttgaaagggcggttgatccgtccttttctcttaatttataggaaggagaaacatatacatgcaacaagcagttacatatgttgtttttttcttgtcgttaatgttcattattgtctttggtgtagaatttgcagggcaaacagttgttaacgttaaggcgaatgaaattagtgaatatgctgtaagtttagcagagagggatgggggctttactcctgacgtaatcgataaagtaaatcaaaagttaaaggatagtaatatggattctaaagattggaagatggaatatacacaaggaaaagtacaatttaatcaacctcttaccttcactatcaaagggaagtataaatataattcgtttaaattacttgaaagaggtataggtacctttgatgtatcagtacaaagtactcgttcaggtgtaggacaagtttattttagataataagcggtcttgaagtgtacggaaagaatgagcaaatatcgtttaagttaagatcgcagtttagaaaatgttcaatagtaagtaaatgatggtttaaattaaatcggagttcttagtagacttcaatatcgcttgctagtacttagcaataaagggtgaaaatatttcaattgtgagccgtctggatggtcaaaataagtttttagttgaaagggcggttgatccgtccttttctcttaatttataggaaggagaaacatatacatgcaacaagcagttacatatgttgtttttttcttgtcgttaatgttcattattgtctttggtgtagaatttgcagggcaaacagttgttaacgttaaggcgaatgaaattagtgaatatgctgtaagtttagcagagagggatgggggctttactcctgacgtaatcgataaagtaaatcaaaagttaaaggatagtaatatggattctaaagattggaagatggaatatacacaaggaaaagtacaatttaatcaacctcttaccttcactatcaaagggaagtataaatataattcgtttaaattacttgaaagaggtataggtacctttgatgtatcagtacaaagtactcgttcaggtgtaggacaagtttattttagataataagcggtcttgaagtgtacggaaagaatgagcaaatatcgtttaagttaagatcgcagtttagaaaatgttcaatagtaagtaaatgatggtttaaattaaatcggagttcttagtagacttcaatatcgcttgctagtacttagcaataaagggtgaaaatatttcaatttcatttgagatatattttcacctttttatatagatatcttcttgaaagagcggggtatatggggagttagttaattcaaaagaaaaggtaaggaaggggctatttatagttctattctaataggggtgaatttcgatgtttacaaaatgtcgagaagtggggattttattaatgttaataccgcttttactaatagcttgtattttacaagcaatgggagaggtgaacgaaaagggagctctataataattgatcttctaatcaaatttatgatgatttatttaataggttatgtcacttgtagttttttatggagagtagaagcagatttcaaggagggataatatgaaacgtttatcaggagaagtgtatcaagatgatgatcctttagcttttgcaaaaggatgtaaaaatggcttaatcattgcccttcccttttgggttgtagtcataggtgttgtaagttttattgtgtaaaaatttcataacaatgaaggggtggaattaatgatcgtttctaatgaaattgctggtattcaaactaaaaaacaagcgtatgaactcgctagaaaaatgacaaaacaggtacttcatgaaggtgctggattaacatggataagaacaacacaatcatttttaagtggtgcaattctttacgtaaaagataagtataaagaaaaagctaggttatcagatgtaagagaatttgttttgcaaagcgaagaaaaggaaggttttttggaacatatcacagatcacttagaaaaaggtcatccttcttatcatgcgttttcaattatgttgacttgtaaggaatctacaagaattcttgttatagctctttctaatttgtgtatgagaactgtaaaggagtgaagagatggggaagagagtgaaaaaggggaaagtgaaaatgaaagatgatattaaagaaatagaggaatatacatctagttgggatgcactggatttttggactagattcttttttgtaggaacggcagccttatgtgggacgattttattaattgctgtactttctttatttaattgaatattcattttaatgttatttgaaatttaaaggtaagtgatgtgatttaattgaagactcgaaaatgcaaaaaatgcaatggaacgggaatgatatttggaaaaacatgctcaatcagaggattcaaagtacatgaatctatggaaaaaacaccatgtactaaatgttttggtaagggtgtgaaatagagcggaaatgctattgtagtagatttagaaattcactagcgagtagggataagatgtgtttacctaagcaatatgaacttgtagaaagaaaagcagaaatgataaatggtattttgaaattttatgatgaagggaagctaaaagttgttcataatactttcatagaattatgtgaattaaatccatatgctgtaaggggatttattgtaagggaattagaaaaacgagacttaaaaggcgtagaggaatcctatgatatatgtttggaagaaataagacagaacgaccttaataaatggctgagtaaaacgcctagaataatatattattcaggtgaaaaagttaaaacggaggtgttacaaaatggatgagctaaaaagagtaactcaatacaaagcttcagatggtacagagtttgatgtaggtgtggataaagatggtttgtattatatcggtgctaaatttccgtttttaacaacatcaaaagatggaaagtatacaaataactttgctggttatgttgctactgatataacggatgaaatgacagctaaggggatcgcgtcgtttgctttctgttgttaccaaagacaattgaagcattataaagaattaaattaaaccaaaattcctaattttgtaggtaaggtatattatttgaagtttattaaaagatggaggcgtatgaagatgggaaaatatcaaatagaagtggaagtaacgaaaacctataaagcttttgttgaagttgaaatacctgaaggtgcaaatagtgataatgttcaaagattagttgaagaaaaagtggagtcaatggatcaagaaaaattagattatcaatctactagtcattttgttctaaaagttaacgatattgaataaaagcgttaattagtttcgaattttaattttgttaaaaatgaaggtggacaatgcgaaattaagagctttaaaaggaagtgtacggatttatgggggaaatcatactattttttgtttgcgtgtacattttggtgacctttgctatttatatgacaataaaagatttttactttgaacaagaacaatctggtttacttgttgttcttgctgtatgttcattacctttatcggcagtgtttacttattttatagttcaattgcttgattatattacaatttgatttttgcttagaagtgtaaattcaaggaggtaagagggtgtgggttctataattccgcattatttgtttgtagtgtgttattcattagatgaggtattacaagtgcatgaaatggcgaaagaaatttttaatccgaaggatcaaagtgaaaaactagtaagtcagctgaacttaacttcttttttcgtcctttgtaatggcaggcatacaagatggggaaatcaagaagagtatatgaaagcaagagaaaagtatattaagtatcttatagatcgggatatccgattcgtggaaataacagaaaaagaatttaacagatttgaaaaagcttcgaaacaatgctttttttagaaaatcgtacttattatgagcatagaaaaaaacagcttatcattaatcagctaattgattgcggtttttacaaggatggaaaaaggcagctctatgaattaaagcttttggaattagaaaagtatttgaaaaacattaaaaaggagagagtaattcttcatagctgatgcaaaggaagtggagttagtggcatctaaaaataagtttgaaaaagaactggagaaagccgtgttgaaggtattaataaaacattggcgatttttcctattactatccggtatattatttgtttggattacaagatacgaaatttcaaatcgattaatccagattgtgccaattgtgaaaagggttgtacatgttagtctactcctactatttattgggactatattttggataactagatgtattgttttatataggctggaaaagaagtcttataaatacgttttagttattcctcatatgtccgatgatgctaaagtagatcaattaggagatatgattcgacaagtgcatggtgagggaagaaaaccactagaacaattgtggaagggtcgcgattggtacagattacttatgtatcagccggaagatatagatgggaagagtcaaaaggttcgattttatttaggtggaccagaagagaatttagcttatttagttaaagcgtttcgaaatgtatataagaacgctgaggtcatagaacaaaatatagaagatattccgtttccgcgtaataaattgtttggtggtgctgttggcgggagaatgaaattaaagacgaaaaagtctttatcattagcccagtataaaactgataaactcccacagcttataagtggaatggaagaaaagacttggattgatgtttctttttcaccagatcgagactatcgattaacaagaagaatcaaaaaagaagaagcagaattaaaggatcgaaagagaatagaaaaagatttagatgtgtttcagaaaacagaagcaaaggttttaacgcaacgatttttagggaaagaaacagcgtttcaagtttgtgtttctgtagcgactgaggtatatcctggtgtcagaatgctaaaaggtttagggaatatcatagcgagtatgatggctgatgtaaatgaacttcgttaccgttcgtttcgtcggtctatttggcgtatcccaattccttattacgggcgtatgacttggactggatcagaacttgttaatttgcttcaccttccaaatatcaaaggtgataaagaggatgtatctgaaaataagattctttatttagaaagtggagagaaaatgttacctgaaggtattttatctgaagggttggaaatcggaacgttagttcatcctctagagaaaaaccgtacagtaaagatattgaatgaagtgtttaaaaaaatgggatgtatagttggaactactggtgcagggaaaagtactgtagcagctaatgtgctagatagtgctatgaaactttggattgaaaatccagatgatgcaagtggtttttcattgtttgatccaaccccagatttggcaattgttatgttaaatcgactgttaaaggctgaattagaaggagcaaaaataccttgggaaaaggtgcatttcattcgttttcgagatactgattatccaccggcgattaacttattacattgtaatccaggtgaggatatgcaaacggtggttgactccatttttgatagtattaaagctcttgttccaaatccagccccacaaacggagagaattctaaaatcgattattggaacgctattatgtgatggaagccaaaagcattctacattaagtattatttcattttgtacagatgaattgtttagagagcgtgtattagatggtttagaaggtccagagtcaacgtactatagaaatgtttggaaaaatgaaatagggaacgcgctagaagatagtgtgcagcctttgttgaaccgattggatatattcaggagcagtacatacttaaaacgtatatacgggcaatctgagttcgctttagatatctttaattggatggaaaaaggacatattatcttttacgatttgtcaggtatggcgaatacagatattaagttaacgattggctacattatgaatcagtatcaccgtgttgtgcaaaaaagacaggtggggtcaaaattacacctaacgtttatagatgaggctcacaaagtacaagttccaattctccctaaaattgtagcggaagaccggaagtacggattgggactttggattattacgcagcaaatttcaggacagctagataaggaattaacggatgctcttacggaaataggcggtaatttctttgtttgtagacaagggaagtcttcggctaaaactctagagggagttatgcaagggaaatttcgggctgagtatttacaagggttacccgacttacatgcagccattcaaacgcaagataagtttgaaggagaagcgaaaaatgtgtggtgcatgataaaagcgaaacctctagaccgctatagaccaaatggcaagattgcaacgtatggaaatgataaagaaattgctgattctaatgaatggacatacaaaaaaataggtgaattggagaagcgaggaaagtcagctgaagaaatagatcgagaaattaaccttttcttatatggccaagacataacagcttcaactaaagtgaacttgaaaaaagaggatgaatcactctttgaaaaggccgaaaaagaggcggcgcaagaggaatcgctctttgagaaagctgaagaggcggcgcaagaggaatcgctctttgagaaagctgaagaggcggcgcaagaggaatcgctctttgagaaagctgaagaggcggcgcaagaggaatcgctctttgagaaagctgaagaggcggcgcaagaggaatcgctctttgagaaagctgaagaggcggcgcaagaggaatcgctctttgagaaagctgaagaggtggcgcaagaggaatcgctctttgagaaagctgaagaggcgacgcaaaaggaatcgctctttgagaaaaccgaagaggcgacgcgagaggaatcgcctgtcattatggatatgccttttccctgggatatggagaacaccgatcatatttttttaaaagagaaagaggaaattaattatccgtttgaaacgggggatgacgataaagaaaagtatcccgttgaaattaaaaatgaggaattacagaaagtagaaaacgctgaatcaaaagaagaaaaaagtatctttgacttttgatggtgggaaggaggatgaagatgattttaaccactgaggatgaacaattattgatggatattcatacacatatctatttagattttgaatatattcgtatgaaaaattatcctaatcataaagaaaaatccgtctacgcaagactggcgaaactagagaaagaaaactacatcaaaagtgaaagacatccagtagcaagtattcgtgggaagcgtaggcgatcaggtaacggatcaaatatttatacacttgataagtacggggttgaaatggtgcgggagttgagaggggaggttcattggaattacaaatggtccaatcgagttgcgactttcgtttatcatagtttgatgttggctcatgttgaatgtgccatgttagagcaatcaaaggcagacatcccaattggaataaaagaatggataaatgaagcaagaggaacgtttcaatatgacaaaaataaaagtgctgttattcgaccggatggattggctgttattggcttgaaaaacagaatcgaaggtaattatggcttgtttttggaaatggaacgtacttatggaacgaaagaggttatcgaaaaaaagctacgaaggtataacgactttttaagccgagaggaatcggttaaaaaatatgatcgatatgcaggtctaacatacccaatagagaaatggcgactaatctttattgctggtaatgagggacgacaaaaagaattgttacggtatatgcaagaaatggagagcccgcaagtacctgtttatgtcgtgatgtttgaagaagtcttacaaaatccatttggagcgatttatcggaacatcgaaaatcctaaggagaaagtgaggttataagagggtgtttcgatttgtactttcaacaattgtttcttttataacggcagttattgttttagttgtatcaaaagattttatttttcgtagattcccagaagcacaaccggtttatgaagaaataaaatctatgtttttagagatttatggaaggtatggctgggaagggttacttgttgtaacagttgcagttatgggcctttcaaaagcatttgataaaaaaggttaggagtgaaatggtgtgggattaaaagaaaggttgaataagtggagggaaaaaaggaggaaacctttccgaataccttcgtataaagcgaagaagatcgggaatgtggtcttctgggtactcttcttatggatgttcacggtttcgattaccgggcttattacgaataataaattgaaagcaatggtgcaaaaggggccggattctaaagtgcaattagatcagaatggagctacacggccagaagcggtagaatttacaaagcaatttgcaaaggaatactttacctggaaacgtggggataacgagcgtgctaatagagaagggcgtttaaaaccctatttattagaaggagcagacccacaagctggattagatatgcacagtcttcagtgggatgcaaattatgtacaagcttccattgtgcgggtaaaagagactggaaaacaaagtgcagatatggttcttaaagtggattataaacttactcgtcaagatgaagggaaagacgttacagaaacaattgctgtaccaattcaaacggatggaaaagggtttattgtaacaggaaatcctcaagtggttaaagtagacaataaagcaaaaatcaaagttgataaagatgaaaagcagtcagatgaagcagattataaagcgaaacaagaaattcgcgacttcttaccaactttcttcaagtcttacacaacagcgacccaaaaagaattggagtatgtattacacaacaaagatattaaagggttagaaggagcgctacactttgaacaaatcaaagaaacgaaggtatatgtaggatcaaagaaaggtacgtttgatgtttatacaattgctgaaatgaaggatgctgtttcagaatccaaaatgacaatgaaatatgtattaacagttaaaaaagaaggaaaacaatatatcgtcactgatatgactgtgaaatagagaggggaaaataaaatgaatttattaaataatatgatactaggatttggtttggatggagcgtatgactgggttaaaacacaagggaaatatgctttagggattatcattattgggttagttatcttttgtattgcgaagcgggcatggggcttccttgttacaattgttatcgcgggtggccttggattcttccttgtagcagcaccagaaactcttgaaaaagtaggatcattcttaggtggaatgttaggaatgtaattaaataaggaggcgttcttgctgatggaagaaaaatcaaaaccttttattgtatatactttcggaagttatatgaaatatgaacgtcgccaatatgaattattaggctatcgtcttccacgacctgtgtcgtggaagatgttaggctattatgccttaatagtattggtgtttgttatattaagagttttcccattaacttcttggtttattggaccaattgcagatgaattttggcttccatattatattatcattccaggttttgcagtttggggcttagatacgtataaaacagatggtaagtcatttttagtgtttgctagatcatggattttatttaaattaaggccacataaaatgtcacgctttataaagtttgaaaaaccaaaaaaatatgtttttgaaagtcctattttcattcgttaccgtgaatcggatattgttcctattatacctacgagtcaaggggaggttgaagattacccgttgactttaatagaacaagagacagaagaattcgaaacaatgcgtttagaagaagacgaatggtattaaaataagaggatgaaattgaatgtttaataaaaaatattgaaaatatagaaggtgaggatatttaatgcttgcgttaaatagtgtatcggaattcccaattaatcatgtagaggataatctttgtttttgtccagatcagagggtttggagtatttatgaagtcgaaggttttgaatatgaacatcaaagtgatcggatgaagaaaacatatttctcaaaccagaagtctttatttacacaattagaaagtgattttcatttacttgtcattccaaaagtaactgattctgacgcaattatagatgaacatattgcaagattgaaaggacctttgtctaacacggcaaaggtcctttttgaaaaagtgaaattatatttgcaacaatcatcagtctcaaaagaaaatacagaatatcattttttcttattggtgcaattaaatcaggatagaaaagaaaaacaagtcaaaaatccagtaattgaaacctcaaaattcgcacgaaaatttataaaggggtttactgaaacgccgtttcgagcaatgggaattgaagaaagtgatttgttagaagaagagattaatgattataaggaagctgaagatggtatttataatcaattgttaggcgcttttcgttttgtgagaagagcgacgccaccagttacaaggttcttaattgaacataatttcagtcgtggaatgacagctccagaaacagtgaaggattggaatgtaggaagaaaaatttcatgggtagatgaaaatggagaaactaaaaaggctacacgtccagatcgtgatgctattctccgcttaactgagtgtgaagtagatgaagagcctggccgttgtattcgacttcaaaggagaaatgcagagggggatttagaagaaagttacgtttcgtttcttgcagtaagtgatatggacccacaatcacattttccaggccgagaatggatatatcgtatacaatcgcattctttaaaattcccggtggaagtaagtattcgtggtcatcatatggagaatgtgagtgttctaaaaggattgcaaaatagcgagcgggaattaaatgaccaacgtcaccaggcggcacttggtggaacagtagaccggactgtagatcgtaaggcggccggagttaaactgatgcaagacgttttccagacaacgggtgcaccaggatttgaaatgagtattttatttgctgttcatgctcaagatcaaaaaacattggctcatcgcgttaagaaactaattacagagtatagaaagatgaaaattcaattagtaaatccttatggcgatcagatggcatatttctatgaatttttcccaggggccaaacgctataataaagattttaaaatatatgcggagccaggagttttagcacaaggtatgtttggggcaacaacacaaattggcgacaatcaagggttctatattggtcgtacagttaaattaaatcgcccagtctttattagaccagacttagcagcaaaagcgctagagaacttaaataatgaatttgatagtttatcagtaatgatagccggtatgacagggaaagggaaatcgttcttaatgaacatcttattatactggattgttatgagcgatgggcttgcattttgtgtcgatcctaaaggggatagaagtgaatggccaaaattgctcccagggtttaagaaaaataaggatcaattggaagtgtggactttaggacaaagtgaacgtgataaaggatgtttagacccattccgtgttagtgcaacaaaagaagatgcgatgagtttatcgttggaagttttaacatatttaacaggtgtaacgctagagaattcaaaatatgacttcctatggacagcaattcaacgagtggcaaagaaagaagagccttgtttatctttagtaaaagatgaattgtttgaaatgaaacaagatggtgaattgatccaagaagagttggcattattaacagaattagtaacacgtttaaatacaattgaaaattcgccacttgcaaatctattgtttggtaagcctggccaggattacagagccttagatttagaaagggctttacaagttttacaaattcaacatttatcattaccaccattagagcaaactgtattgagtattactgataaattatcagaaagtgttcttacagctttaacagcattcggtaaatcccttatgctttcaacagatcgtaagaaatttaaagtttatattcaagatgaagctaaaaacgttatgcgaaatcgtgaaggggcaaaactttcggatgaaattattcgtaaagggcgttatcacaatacaggattatatcttggtacacaaaatgcgagcgattttaattcagcgaataaggagattgccaacgttggaatgaaattctcctattgcttgaaaaatgatgctgaagcaaaagaaatgttaggatattataatttgccagtaacagacgctaatataagaatgttgcagaatttaaaaaggggtcattgcttgttccaagacatctatggacgtacagcagttattaaagttgatcctgttttcaaagaattagcagaggcatttgattcttcaacgaaaacagcggaagaacgtgaacaggaactcgcgggcgcttaatataaggcgaaataggagtgaaggaatcgtgaaatataaaagaacattgggctatttagtaggagctattatggctggagggttaattgtaacaacccttacagcctgtcaatctactaaaagtgaagtgatagataatcagaaatcgattaatataaaagcggctgataaagcagccttggaatatatgaaagcttatattgaattagataataaaaaaatgaatgaattgcatataaatgaatacgaatttttgaaggaatacaatgtaacatatccaggggcaagtgataaattgaacgggcgatatgagctgtttaggtatgatctagaagaaggttcaaatgaattttattacaaggctcgttattatcatccaggtacaggtgggaagagtagtgtggaattaaaaatgataaaagataaaaaagatggaaaatggaagaattacggttgggcttggggagatactcacaatttagagtccattgtaggagataagaagccaatacaagtccataagtgggagggggaacgagaatgaaaaagctcttccctctttttatggccatttttattttatttgtcggtactgtgccgaatgtagcctttgcagaggacgaaccaaaagcgtcagaggccaatacaatttcaggtaacttgtttgataaatctaaacaagaagattttgagaatgttcattatgagatagataccgcaccacataaagacgatgagaaaggctttttctcaaaggcttggggctatatgtttggtgatgattctgtggggaaagatatacagcggaaaattaatggagttggtcaatggatagtttcattaatgttccagtttggggtttggttgacaaaaatattgttatttatagtagaacaatccttcagcttagacattatcgatgttgttgcagataaattaggtaaagcaatgcaaaatatagcggggattggaagtaaaccggaatttgaaagtgaaggtttattcccgtcgattattaaaatgacatgtattttatctgttatatattttatttatctgttttttgtaaaaagacaaatgacaaaggggataagtgaattatttaaggtagtgtgtgttattgcagggatattgatttacatcgcaaatgcaccagcgattctgaaaggaatgaatacaattagttctgaaattagtcttcaagttttaagtaagacaaccggaacgatccatgggaatccagggcaaacaaaaagtcgggctatagcgaatgtaaaagcacaaatgtgggaattgatggtggaacgtccatatttgtacttacaatatggtcaagattcactagacactattggtgtcgagagggtaaataaattaatcaatacaccacctggggaagatagggttaagttagtaacagaagatgttaaagaacataagaattttatgatgacaaatgagtcggtaggggagcgattgatatttacatttatgtactacattgtaaatacttttgcaggagctccaacagcagttatatgcttgctgatagtagcgtgccaattgttatttatggtaatgagtattattggtccaatagcgatggcttttgcattactacctaaaaataggcgcgttttaattagttgggctgaacaatggcttaaaccgttagccgcaaaaatattcttgtcacttattgtaattattctgttttcaattgctgggctgttatatgaacttccggaagcgggaacatctggctatttaatgacgatgatccttcagattctggtatttgtcctttgttatatctttagagataacatcaaagcggcattccgtaaatcgaaggttgcgtataattcatttacggatttagagtatatggcaggcaaaacaaaggatggatttaatcgaacaatggatggcattaatgcaggtgtaggaagagcaaaagatatgtttggagattctgatccaaattatatgggggatgatccttctgaacatacagctgatgaaagcggaacaaaacaagctaccctagatgaagagaaagtttcgggagaaagtgaagaagaaaaaacaaaatatgcaagtattggtgaagaagacgaacaaacagaacaacatcaagacgaagaaaagcaagtcgaggaagaacaagaaagagccacaattgatgaagatgaggatgaagtggttgtaaatgcagagcaagaagagacagaagagtatcaagaagatcaagaagaagtcaatccagaaaaccttgcatcgttagaaggagttgaagaagaaaatccggagttatctgaagtagaagatgcggagcagcctgaacaggatgattcttctcaatacgaaaatcaagaaggagaagataacaacgaagaactttcaaaaattaatgaggaaagagaaggtacagaaaaaagcgattcagaattgcaggatgtagaagctcaagaacaaggtgagcaggatgatccatctgattatgaaactgaaaaccaagaaggaaacaatgaagaattggcaacggtgaatggaaatgatgaagaagaaaatccggagttgtccgatgtagaagatatagatcagcctgagcaggacgatccttctcaatacgaaaaccaagaaggggaagataataacgaagaactttcagaaattagagaggaaggagaaggggcaaaccaaaatgattcagaattgcaggatgtagaagctccagagcaaggtgagcaggatgacccatctaattatgaaacagaaaatcaagaagaaaataatgaagaattggcaacaatgaatgggaatgatggcgaagaagaaaatccggaattgtccgatgtagaagatataaagcagcctgagcaagatgatccttccgattacgaaacagaacaagatggagggaacggtgaagttttagtaacgactgaagaaactgaagtggattcagcacaaaataatgaaccgttatcagatgtagaaacaccagaacaagtagaacaagatgattcctctaattacgaagctggatatgaagaaggaaatgcaatggagttagcgacaacagaagaaagtactacagactcgcaaaaagagaatatggaagtgtcagatatagaaacaccagaacaggtagaacaagatgattcctctaattacgaagctggacatggagaaggaaacgcaatggagttagcgacgacagaagaaagtactacagactcgcaaaaagagaatatggaagtatcagatatagaaacaccaggacaccaggagcaagataacgtttcggaatatgaaactgaaaatggtgaaggagccttaaatcaaattgccagtgttggacagctgaactcttcagaaggaacttcaaattcaactggaaaatcaggtgagattgtaccatcattggatgaaaaacaaggggtagttaatccatctggtatagatcaggaaagtgggagtgaaaatgaatttgtattaaatgaaacgaatggaaaggaattgacttcaacaaaagggttggaggcaaaaagttcgacgaaaacggaaggttttaatttagagggaagtccaattggaaatggttcgacaaaagtatcgtcagttggtgaatttaatatagcgaagcctggtggaatgggtataaataatgaatcgatgaatgttaatgatatccaaggtgcatccgtcgaatcttcgggagacttgacgatgacaagcccggattcgctagaatcttccggttcgattcctggacaaactatgaatggaagtagtttaggagaacaagggataaaaggtcaaactatgaatggaaatagtttaggagaacaagaggtaaaaggtcaatcttttgaagggagccaagtcttgcaaagacaaggggcttcgcaagagattaggggagcggtggaagcgaagccgtcagaacatgtagagtcttcgcaagccgataaaataaatagaacaaatgaaacaacacatatagaatccgcacaagcagaagtagcagcatcgcaagaaattatgatagatgcgacacaacaaaaggtagagttagaaaccttagctgaagaaaatgaaataaaaatagaaacagaaacaatataaaaatatgtatttagttacaatgcctcgctagtttatagcggggcattttttgtaagggaggtacatgaagcgtggatttagagcacgaggatatagaggaaaaagaagccaaaaagaaagcgaaaataagtaaagtccgtaaactatggatggttagtggttgtttgtttagtagtgtttctctaattgtaattttctttgttttaataggaatcgtcttatttatgcttttaggtgatgaaaaaaaagaaccagtaagtggtgggggcgggttaataggtaatacaatttgccgcccaggggacaaacaattgaccgcagcggatttagacccacacttgaagggtgtgtttacatctaaggggcaagcttttattgatgcaggtacacaaaataatattgatccagtcttattaaccgctatagcgatgctagaaacaggtaacggtacaagtaatgctgtgaaaaaatataacaatccaggtggattaatgaaccccgcaagtactaacatgacaggctttattcagtttgcgacattagaagaaggtataaacggcatggctcgtaacttatacaaaaattatataggaatgggaattacaacaattgaagcaattggtgctaagtatgcaccgccgggcgcggcaaatgatccgcacggtacaaatggtttatggccagctttagttacaaagtttgctcagcagttaggtggacttacatttaactgtacaccagcagatagcggaggtgttgggaacgtgggtgatcctagctcgcatggatttgttttaccgattccaggaagtccacttgttaccagcccatatggtccgcgttggggcacgattcataaaggaacggattatgcgtgtacgcgaggacagacagcgattggcgcggcaaaagctggtcgagttggttttgcacagtttggagccagcggtagtggttttggtggatacggaaatgcagtggttctagaacatgaaggcggtttgtggacgttatatggtcatatggacgtactttctgtgcaacaggggcaaatggtccaagcggggcaacagctcggcgtatgtggggcgacagggcaagttactggcccgcatttacatttcgaaattaaaacatcatttaaatacggtcaggttgacccggcaccatatatgccgtaataagacctacggtaatatgtcaactaaaaaatataaacgtttaaagttatcaaagggcaatttgctaaaaaaagacatcacgaaactagaccagcattatatgtaaaataatggaatttattcaaaggtagcgatgacaaattttatgtcacactttcacgcccctttctggcgcaaagagttggtgactacgtagtagcgcatccaccaatcgcacaagttttcttgcggttagaacgagtgcacgtttgtgttgatgttttggtacttcattatatttttttacgtaatattcttgataatcagatacatgccttcttacagagttggcggcttcaactaagtaataccgcaagtaatgatttccattacgagataatgaagtgttttcagcagtgaagcgaccagactggtgtgtacgccaatataatccggcatattttgctatcttggtttcatcatcaaatctttcgatttgaccaatttcagcgataatacctgcggcgaatacaggaccaattccaggaatggattcgagtgtttgcgttaatccagccatgattcgcttaatggacttctctatttctttgatttgttgttgataggtacgaattaccgcaattgatgttccgagaaggacatcgattgagtcttccacgaccttatccaagcgataggaagagcgaacagccttttgaattgttgatgctacacattttgggtcaccaaatcggtttttccctttcatttgtaggaactcagcgagttcatctaaagacatgtcagctaactcttctagactgaatttttcaaggaacaattccatcatggcgttgccaaatatagaagaatccacctcttgtgaaaacgtattacatttataacttaggtgttggagaaaatgttgtttttcctttgtcaacattctaacgagctgataacgagatcttgttaattgctgaagtgccacatactggctttctttgacgatggacatttgattccgtccgaatcgtaagtaatcagcgatgacaaatgcatcaatctcatctgttttatccatgtcagaatagcttttcttgaagtttgcgatttgctttggattcataagaaataccttcgctccaaagcgttgtaagtcttcatcatagtgaagaaacatagatggatgaaaactataaacagatgtggattctaagccgattttaaaggttttaacctcttgattggctatacgctgcaataatcgctctttgattgctgtggcacctggcaagtcattattgaccgaaaaggaatccagcttttttccttcaccatttaaaatacaaacttttatatcaaacgaacttacatctagaccaacaaataatctcacgtaagagacctcctttcggtttagaatcattgcttggacgtctcgagatatctctagtgtgtacgccgaccaacaacctcgtgtatgagagcttgtcctgaatcgaaagccgccctagagctactatcatctaggttcgagggtcaggctgctcagcctgcgagtagggagtcccgcacgttcactgagaaacactcttaattatgtggtaagtccacaggagcggtaagaattgtcccaaatgatcctaagaccattatctagaaatatcttgagacgtccaagtattaatttacggatctcttattaagggaaattaaagctgaagtgacagcttaaacataatatacgaggaggaaatcaaatgaaacaaatattacaaattggcgcaattatcgcgttaagtattacaagcttgacactatggagtagtaattctgatttaaagggtgaggctaaacaacagaagacaaaacttacagctgaaataaaagaattgaagaatgtaaataaagaattagaagagcgtttgcaagttctaaaagaaaatacgcaagaaaaaggtcaggtagtggccagaaattttgtagaaactttaatgacgtatgacagtaatgataaggagaaaaaagggcttgaagcgttacggaaattagttaagggggaagcggaaaataaattgtttaatgctggtgaagattcacataagcaaattgatgatgcagccattcattacatgacaaaagcgaatgtgaaagatatgtactatacacgttcagctgaagacaaagcagatgttactgtcaattatgaatatgtaatttcaattgagggagagaagaaaaaagagaatcatagcatgaaattaagcttggtactagaaaatgaaaattggtttgtagaaaactatgatttcaaaatagagaatggaacagaagggccgtaaaagtacggaattaggaaagggttttaaaatgaaaaaatttaatttggcatataaagaggttcgagtatttgaagtgactgttgaagcgggaacggttgaagaggcaataaaaaagtttaatagaatgtcccatcaagatagggagagagtaaatcgaaacattacagttcaagaaagagagcaggaaaatgaaagctttaaataataattataaagttttactttgtatcatattaggtattgcttttaatgtatgggcttatgaaagacccttaattgaagcgatatttgctctagcatacttaatgctttttctatttatattatttgcaacatgctatttcatgttgtggagtaaggttaggaaaatgagatcagagcattgaataattaagtggattttatataagggctttaagagaatatatccaaaatatgaaggaggaagaggaaatgaatgaaaatatgtgtaaatgtcaagataaacatgtacattttcgcttgtttaagcatgtacaaaatcgaataacgttttttgacacttgggggtagtgcaaattcttaagttgatgggcatgtggccatgcccacataagggcacagtttactctttcccatctaataaacgaccaaggccacctaatacactaccttcgccagtactttgcgctgctgggcttgtaaggcgtgctgctaatcggctaagtgttaaggactgaatccaaactgttccaggtccttctaacgttgcgaagaataaaccttcgccgccaaatagagctgtttttacttttccaacgaactcgacatcatagttaatgtcttttgtcatagcaacgagacaacctgtatcaatgcgaagtttctcaccaggttttaattcacgtttatatacagttccacctgcgtgcatgaaagcaagaccgtcaccttcaagtttctgcatgatgaaaccttcaccgccgaagaaaccagttccgatttttttcgtaaactcgattccgatagaaacgccttttgcagcacaaagaaatgcatctttttgacaaactacttttccttgatattctgttaaatctacaggaataattttacccggataaggagcagcaaaggatacgtgacgcttaccgtgacctgtatttgtaaatacagtcataaacatgctttcgcctgtaacgagacgcttaccagcgcccattaattttccgaataaacctccagatgggccagaaccatcaccgaagattgtttccatttcgatgtaatcttccatcatcatcattgcgccagcttctgcgataacgctttcttctggatctaactcaatttcaacaaactgcatatcatcgccgtataatttatactcgatttcatgtgcttgcatttttttcacctcgtatgtaatagatacttatattgtacagaatttaataggattagaatactttagttttgttaattttcaaataaagtggaacaaaccaaaactgattatcagctcccgccaatcaagctgtccgcaaataccgggctaaaatatgaatatggaaattcaacattatattaaaattataaaaaaatggtggaatgaaagtgttctcatttgacgttttggatatagcgtgatatagtgaaatcactattgagctacataatgtggtacggaaataaagcacgttgaattaaaggctgtaagcttgttatacattcatgtcctttatatccaccttttcatgtggattcatagtttcatttttatttaggaggtacatgacatgcaaacaggtaaagttaaatggttcaacagcgaaaaaggtttcggtttcatcgaagttgaaggtggagacgatgtattcgttcacttctcagctatccaaggtgacggattcaaaactttagaagaaggtcaagaagtttctttcgaaatcgttgaaggtaaccgtggaccacaagctgctaacgttacaaaaaactaattagctagcgataaaaagcattccgattttcggaatgctttttttttattctttggaactcgactcatttgaagataattcgcccttaaaggtacgctcttcaaagtcatcaagcatttgctcatattcttcatgttcttccgtagcgaaaacttgcggattttttccatacatatctgtaccaataaagttttcgaaatcctctacgtagcctacgttttcttcactatttacgtacatgccattatagtttttcgaatcttgtctttctaaatcagatggtgtttcagatgttccgtaattagcaacatcttgccatgcatcttctgcatcatattcaacagaacgatcttcatcatgtttgtggaaagaaggagataacacttcttcttcgactggtcgtgtattcatatttagcttatttgtcgcgtgctggatgcatgttgtagcagtcggcattgcttctaatctttcaaatggaatttcttcgccagacacttcgcaaatgccgtacgtacccgcttctattttttgcaaggcatgtttcgtatccgctagctgtttatgccaaagttcaataagcccgaagtctttttcacgttcatatagctctgttgccatatcagctggatggttatcatagctagataattctccaacagactcacgttcagatgcacgatcttcattttcgtgtgtttgtatcgtttgctctagttcgtgtttttgtttttctaaaacggatttaaattgatttatttgttgtggagttaacatagtcgtccaccttcctacaattcagtttctttacatagtatgagcgttgcgagtaggaattatgagatgaatttcagatatgaaaaaggagccgcataagcagctccttttatagaaagtatccaagtaataatccgattcccatgaggagaccgaagatcgtatttgtttttgctgttgcaatcatcgcaggtaccatttccattggaatgcttttgccgataaagcctttcgtcgctttaaatgctttcggtgcacttaaaaatacgataagcatccatggtgatacgatgcccacgataattaaagcaattgtccaaatgtaggaaacgatgaacatagaagcaagtacaccaaccgctctttcacgtccaacgagaattgctaacgttttacgaccgttttctttatcgccatctaagtcacgaatattattagctagtaaaatggcaccaattaaaatggagcttggaatagatagtaaaatgacttctgatgttacagttccagtttgaataaagaatgaaattccaataatgataacacccataaataatccggctgttaactctccaaatggtgtataggcaatgggaagtgggccacccgtgtaaaggtaagcaacggccatacaaacaagaccgattgcagcaagccaccagctagaattcatacaaatataaacacctaatagtattgcgatgccgaaaaatccaaatgctaagttaagcactgtttttggctgaatgccatcgcgaacgatagcgccgccgataccaactgaaccttcgtgatcgagtcctcttttataatcaaagtattcattaaacatgtttgttgctgcctgaatgagaagacaagcaagaagcattataaggaaaagagggagatggatttgatttatacctccgacctgcattgcataggctgttccgatgaaaacaggaacgaaagctgctgttaatgtatggggacgtagtaaactccaccaaatgcgccagcctgtttgcttgcttggttttggcgccgtaggagaggaattcgtttcgacgttcatttccatgttgaatcctcctttggtcacatattgtacacaactaagtgtagaaaaagcatcatttagtgtcaacgtttattttctaggaagagaaggtgaatttctcagaaatgctaaacgttgacaggcctttcgtttgaggtgtatcttaaaatcaagcgtaattatgactatttttcgcccataggggggagacaattgtgattcaaacgaaacaaaaaggcttgcaagaagttcttagtgcagccattaagcatgcaactgatgaaaaaatattggttagttttgtaaaacaaatagactggatggatccgcttctgttttatgcagcaggaaaaaggattgcattggaaaatagatgttattttgcagatccagctcagcatgtaatatttgctggaattggctctgttttcactatagcaaattcttctcacaaacgctttcaagcggctcgtgacgagtgggataaagtaaaagagaaagcatttgtacaaagagaaaaatatgaatttggaacaggtcctcttttatttggtggattttcatttgaccaagaaaaagagaaaacggacttatggaaagaattcgatgatacgacattttcactaccagcatttttattaactgtaaaaaatgaaaaagcatggttaacgatgaatacattcgtttcagcaacagattgtgcagaaactctttataacgaaattgtttctttagaagagaaaatttttggggagagtaaatgtgcattagaaggattgaaattaacagttacttctaaagtggaagtggatccgaaaggctggatgaaagccattaagaaagtgcaagatgagatgaagcagggtaacgtgcagaaggttgtattagcgagggagctaaaagtagaaatggatcatcatattgattctgctcttgttttagaagcacttcgcattgggcaaccggattgttacgtattttcttttgattataaaggagcatgcttcttaggagcgacgccagagaggttaattcgtaaagaagatgagaagtttacttcgatgtgtcttgctggttcaactggtcatggtcaatctatagaagaaagtaagcgaaatagtaatgcgcttcttcatgatgaaaagaatttagctgaacacggttatgttgtgaacatgatcaggtcggtattaaatgagcactgcgaatacgttaatattccggagagtccaggtctattaacaacgaaaaacttaattcatttatatacgcctgtagaggcaaaaggcactgcgagtcttttaacgatggtagaagaattacatccaacaccagctcttggcgggacacctcgtttggaagcgatgaaactgattcgtgatgttgaattgttagacagaggattatatggtgcaccgattggctggatagatgatgaaggaaatggtgaatttgcggttgcacttcgctgcggattattaaatggcgagaaagcatccttatttgccggttgcgggattgtaattgattcagtaccgcaacttgaatatgaagagacaagtttgaagtttagaccgatgcttggtgctttggaggaattaatgaaatgaacaatcatatagaagcattatcatattatttaggcgcgttcgtggatgaactgacgcgtctaaatgtatgtgatgttgtcattagtccaggctcacggtcaacgccgattgctctactaatggaacaacacgaaggaatgaacacatatttacatgtagatgaaagatctgcaggattttttgcgctcggtatcgcaaaagcgaaaaaacgtccggttgcattattatgtacgtcaggaacggcagcagcgaactactatccagctgtatgtgaagctttccattcacgagtgccgcttatcgtcttaacagcagatagaccgcatgaattaagagatgtcggtgcaccacaagcgatgaatcaatttaatttatacggtacgtttgtgaagcaatttacagagatggcacttccagaagcgagtgaagcgatgtaccactacgctcgcatgacaacgcagcgcatgatagcaagtgcttgtttagcgccgcaaggacctgttcatcttaattttccagttcgtgaaccgcttatcccggacttttcattagaaagtttatgggataaaggacgcggggaatatacagaagtagttcagcaagggaacgtggtgatgccgagtgaatatgtagattctcttgtagggcgcctttcacatatggaaaaggggcttattatttgtggagatgatagtcattcagaaatcgcaacgtttgcaacgcaactagctgaaaaaacgggatacccaatattagcagacccactttctaatattcgtagcggacaccacgataaaacgatggtaatcgactgttatgatacatttttacgaaatgaattgttaaaagagacgtggaagccggacgttttaattcgttttggtggtatgcctgtttcgaaagcattaacgcagttcattaaaaaacaaacgaaagctgttcatatcgttgttgacgaatctggacaatggagagatccagctcttgttgcgacagaagttgtacaggcaagtgatattgcattttgcagtacattaatagaaaaaatgccagttatgaaaaagaatgattggtcccaaatgtggcaacatataaacgaaaaaacgaaggaaacgcttcgtgaaatggaaacatatgaaactgcatttgaaggaaaagtcattacagatattgtacgcgtattaccagaaggagcaacgttatttgcgagtaatagtatgccaattcgtgatacagattcattcttcttcacatcagataaaaatattcaagtgatggcaaaccgcggtgtaaatgggattgatggcatcatttcgacagctttaggagcgagcatgatttgcgatccgctcgtattagtcatcggtgacttatcattctatcacgatttaaatggactattagctgcaaaattacatgaattaaatataacgattgtcgttgtaaataatgatggtgggggtattttctcattcttaccacaatatgagaaaaaggaacacttcgaatcgttatttggaacgccgattgggcttgactatgagcatgttgttaaaatgtacggtggttcatttagccgtgtaaatggttgggagcaattccgggaggaagtacaaaagggagcaacgacagaaggtttacacgttgtagaaatttgtacgaaccgtgatgaaaacttaacgttgcaccgtacgttatgggcaaaaacacaggacgtaattactacatcattgcaaggtgaatcaaaatgaaagtaacgctgcaaggtgtatcgtatgaatatgaagtagtcggaagcggggaaccacttctacttcttcatggttttacgggaagcatggaaacgtggcgttcttttatctcttcatggagtgggcagtttcaagttattgtagtggatcttgttggacacggaaagaccgagagtcctgaagatgttgcgcattatgacattcgaaatgtggcattgcaaatgaaagaactattagattaccttcatattgaaaaagcacatatacttggctattcaatgggcggtagactggcgattacgatggcgtgtctatatccagaatatgtacgttctcttttattagaaaattgtacagctggactcaaaagtgaagatgagcgaaaagaacgctgtgaaaaagatgagcgacttgccgataaaattgagcgagaaggcatagaaagttttgtatcgatgtgggaaaatattccgctgtttgaaacgcaaaaacgtttagcaaaaaacgtacaagaagcggtgcgaaaagaacgacttgctaacaatccaaaaggacttgcaaatagcttgcgcggcatgggaacaggggctcagccttcatggtgggatgagctacacaacttgaaaatgcctgttcttttaatgaacggagagcatgatgaaaagttctttcgcatattaaaaaacatcgaaaaatgcgtctctgacgcgaaatttgtcaaaattgatggtgctggccatgcaattcatgtggaacaaccggaaaagtttgatacaatagtaaagggatttctaaaaactatgcagtgatgcttttttcagttaagaatgaagttacacttatagatgagatcagaaatatacaaggaggtagttgtaatggctattgaatgggtaaaagaaggcaattacgaagatattatttattcaacatacaatggtatcgcaaaaatttcgattaaccgtcctgaagtacataacgcattccgtccaaaaacggtaatggagttaatcgacgcttttgcacaagctcgtgatgatgcaaatgttggcgttatcattttaacaggtgaaggtggacgtgcattctgttctggcggcgaccaaaaagttcgtggtcatggtggatatgtaggtgacgaccaaatcccacgtctaaacgtattagacttacaacgtctaattcgtgcaattcctaaaccagttatcgcaatggtagcaggttatgcaatcggtggaggacacgtacttcatatcgtatgtgacttaacaatcgctgcagacaacgctgtattcggacaaacaggtcctaaagtaggaagctttgacggtggatacggagctggttacttagctcgtatggtaggccacaagaaagctcgcgaaatttggtacctatgccgtcaatacagtgctggggaagcgcttgatatgggcttagtaaatacagtagtaccattagaacaacttgaagcagaaacagtacaatgggcacaagagatcttagcaaacagcccaatggcacttcgtttcctaaaagctgcattcaacgcagacacagacggtctagctggtattcaacaactagctggagatgcaacgttattgtactacacaactgacgaagcaaaagaaggtcgcgacgcattcaaagaaaaacgcagtccggacttcggtcaattccctcgtttcccttgatcaaatcaaaagcggagccgactgtttagccccgttgactaaggttcttagacggaagcggctcgcccacaaagtgagtcgcaaccaaatgatcaaaccggaaacaaaacaactaagagacttgatgtcacatcaagtctctttctttcatgaaaggagaatgtatgatggagacgatgccaaattggttaaagcaacgtgcatttttaacaccagatcgtactgcaattgaaatagaggaaaaggaagttacttttatgcagctgcatgaaaaggtagtatctgtttgtgaacacctcacgcatgtaggagtgaagcgaggggaaaaggtggctgttctgatgaaaaatggtatggagatgattacagttattcacgccctatcgtacgtaggagcagtagctgtgcttttaaatacgcgtctttcaagagaagagctactttggcaaatggatgatgctgaagttatttgtttagtgaccgatcaagaatttgatgctaaagatgttcctgtctattcattcgccgaagtgatgaatggaccaaaagaggaagcctctatacaagaagaattctctttagaagaagcgatgacgattatttatacgtcagggacgacagggaaaccgaaaggcgttattttaacatatggaaatcactgggccagcgcggttggctcttcgcttaatttaggacttcgtgatgatgattgctggttagcgtgtatgccgatgttccatgttggcgggttatctcttctaatgaaaaatattatgtacggcatgcgcattttactcgttccgaaatatgatgctgattttattcatacagcacttcaaacgagaggcgtaacgattatttcagtcgtatcaaaaatgttaactgatttattagagagacttggagaagaaacatatccttcttctttacgatgtatgttacttggcggaggaccagcgccaaaaccgttactcgaaacatgtgtagataaaggaattcctgtgtatcaaacgtacggtatgacagaaacgtcttcgcaaatttgtacgttgtccgcagattacatgttaacgaaagtaggatcagctggaaagccactatttcagtgccaacttcgtattgaaaaagacggcgtagtagtgccgccacatgcggaaggcgaaattgtagtaaaagggccgaacgtaacaggcggttattttaaccgtgaagatgcgacgcgtgagacaattcaaaacggatggcttcatactggcgacctcggttatttagatgaagaaggatttttatacgtattagatcgccgcagtgatttaattatttctggcggagagaatatatatccggctcaaattgaagaagtgttgctgtcccatccagcgatagcggaagctggtgttgtaggtatgactgatgataaatggggacaagtacccgctgcttttgttgtgaaaagcggggcggtaacagaagaagaaattcttcacttttgcgaggagaaattagcgaaatataaagtgccgaagaaagcatgtttcttagaggaattaccacgtaacgcttcgaaaaaattgttaagacgagagttaagagaattagtggaggagaaagaaacagtaaacaaaaacatagacaaaagtaggcatatataataaaaagtaattatgaaacaatataaaccaaaagaattttcagaaatgcttaatgtctctgttaagacattgcaaaggtgggacaatcaaggtgttttaactgcttaccgaaaccaaaaaggaagatgatactatacagaagaacagtataaggaatatatgggtattcaagaagaaaataaagtaggcaaagtagttatttacacaagagtatcaaatccaggtcagaaagatgatttagaaaatcaggttgagtttttaaaaacattcgcaaatgcacgagggatgattgtagatgaagttatcaaagatattggtagcggattaaactacaaaagaaaacagtggaataacctgattgacagttgtatggaaagaaatatttcgactatcatcattgcacacaaagatagatttgtacgttttggatatgagtggtttgaaaagtttcttcgtaaaatgggagtggaaattatgattgttaacaatgaaaaactatctcctcaagaagaacttgtgcaggatttaatatctatcattcatgtatttagcggtagaatatatgggttgagaaaatacaaaaagaaaatgtcggaggatgaagatttatgaaaagagcatatttaatagaaatcaaaccgacaactgaacaagttagtaaaatccgtcaaactattggggtgtgtcgatatgtatataacctgtatatctctaaaaataaagaggcatatgagtcggatgggaaatttcttagtggctatgacttttctaaatggttaaacaacattcatacaaaagagtgtgaccagtggattaaagaagtgtcgagcaaagcggtaaaacaagcgattatgaatggagataaagcttttaagcgattttttaaaggtttatctaagtttccacgatataaaaaaagaagaagcaagatgtgaagtgctactttccgaaaaacaacaaaacagattggacagtagaaagacatagagtaaaagtccctacaattggttggataaggttaaaagagtatggatatatttcaaaaaatacaactgtaaaaagtggtacagtatatcaaagagcaggaagatactatgtgtctatactctgtgaagtgaaagaggtaaaaccaaattcaattctcaatgcagtaggtataggaattgatttgggaattaaagacttcgctgtacgtagcgatggaaaaactcacaaaaatataaataaaacagtacaagtaaaaaagatagaaaaacggttaaaacgtgaacaacgctctttatcacgcaaatttgaaaatataagaaagagaggtgaacaacctgttactaataaaagagcgaatataaacaaaaatattcttagggtgcaacagctacatgctaggctagcaaatattcgattagcgtatgtaaagtctattgtaaatgatgtggtgaaaaccaagccaatgtttattacagtagaagatttgaatgtgaaaggtatgatgaagaacaaacatctatctaaagctgtagcgcaaccatgtttttatgcttttaaaacatggttatcaacgaaatgtagggaatatggaattgaactacggcaagtggacagattctatccatcttctaaaatatgttcatgttgcggtcaaaaaaagtcggatttaaagctgtctgaccgagtatatacatgtgattgtggaaatgtaatggatagagatttaaatgcatctatcaaccttttacaagcaaaaaaatatacaatactaacgtaaatagattgtatatatgtacggtgggctacatcggaatttacgcctgtggagtgtcacagcaaactgtagtagcaagtgattagcgaggcagggcacgtagaagcaggaatactctaagaatatacatttgtctatatttttagtagcagatgtaggtggaaataaaaaaagcgacacttcatataacagaaatgccactcgtaatcccgtttgctgcaagctacgggacttacgaaaagcgtgagagtatcgttattgaattagaagatgaagatgggtacattggatttggcgaagtcgttgcgttctctgaaccgtggtatacggaagaaacggtgaagacggcgctgcatgtactgcaagactttttaatacctgatttattaaaggctgaaatttctcatccgaatgaggtaccgggtctatttcaacatataaaaagaaaccgaatggcaaaggccggaattgaaggggctgtttgggatttatatgcgaagtgtcaaaagaaatcgttagcgacagtgcttggcggaacgaagtctgaaattgaagtcggcgttgtaattgggatcaatacgattccggttatgttaaaacaaatcgagaagtacgcagaagaaggatacgagcgttttaaagtgaaaataaagccagagcatgattacgaattattgaaagagattcgaaaagagtttccgcatatcccgctaatggcagatgcaaattcagcatatacattaggggatacggagaggctgaaacgactagatgaattccaattaatgatgattgaacaaccgttagccgattatgattttcttgatcacgcggagttgcaaaagaaaattgaaacgccgatttgtttagatgaaagtattcatagtttagaagatgcacgcgttgcgattacccttggtagctgccaaattgtgaacgttaaaccagggcgagtgggcggattaacagaatcggttcaaatccataattattgcatggagcacaacatacccgtttggtgcggcggtatggtggagatggggatttcaagagcacaaaatgttgcgcttgcctcattgccgaactttacgattccaggcgatatatctgcttctagcagacattgggagcaggatattatttcgccggaagtgacgcttaagggcggaaaagttatggtgccgcaaagtgttgaagctgagtatgaagtagaccgcggaaggttggcggagatcacgaaacagcgaattgttttggagcggtaacttgagtctttaaagtagcgggcgaatttcgttgttaattgtcggtaagtcgatatatttcaataatcgctgatataatgcgagttacggtcgatataattgagaaatcgccgatataattcaagttatggtcgatatatttggaaaatcgctgatataattttatttacaaaggttactctaacgggtaaccttttcgtattgtacaaattggatagactagtttacaatcgagcgtataaaagggggagtaaaatgaagcgcatttcaattttaatagtggatgatgaggcagaaattgctgatttaattgagatacatttagaaaaagaagggtaccacgtcgtgaaggcagcagacggggaagaggctgttcatattattgaaacgcagccaatcgacttagtggttttagatattatgatgccgaaaatggatgggtatgaagtgacgcgtcaaattcgcgcgaagcaccatatgccaatcattttcttaagtgcgaaaacgtctgattttgataaggtgacaggtcttgtattaggtgcagatgattatatgacgaaaccttttacaccgattgaattagttgcgcgtgtaaatgcacaattacgtaggtttcttacattaaatcagccgaaagtagcggggaataaatctgctttagaggtaggcggagttattattgatcctgagcaaagaacagtgaacgtctatggagagcaaattgagttaacgccgaaagagtttgatattttatatttattagcgagccatccgaagaaagtgtataatgtggaaaatatttttcagcaagtatgggcagatgattattatgaaggcggaaatacagttatggtacatattcgtacgttgcggaaaaagcttggggaagataaaagaaaagataagctaataaaaacagtgtggggagtagggtatactttcaatggctaatatgatgaaaagttttcgatttaaaatgattgccttatttgcgttaagtatggtgcttgcagcaactgtaacttatataatttataaaggattgcagctgtattataaaacgatggttcgctatgaagagcctttagcgcaatttaggtcagtggtaagggaagttggagacattaacttctttttaattttctttattccgttatctattatctttttcttctttttgacaaaaccgtatttaaagtattttagtgagatttctaacgggattcatcatcttgcgaacggtaactttacgaataaagttcaagtttcatcaaacgatgagtttggagatatcgcacgtgaaataaatgttgcgagtgaaaagttaaaagaagcggtggaaagaggagactttgctgaaagtagtaaagatcagctcgttgtaaacttagctcatgatttaagaactccattaacatccgtgttagggtatttagatttaattcttaaagatgagaatttaacaaaagaacaaattaaacatttctccacaattgcatatacgaaatcgcaaaggctcgaaagtttaattgatgagttatttgaaattacacgtatgaattatggcatgctaaagctagataaaaagccgattgatataagtgaactacttatacagttagatgaggaattgtatcctttattagagaaacatcatttacaagctaggttgaatattgatcctcatttgccaattaacggtgatggaaaattgttagctagagtatttgaaaacttgttaacaaatgccgttcgatacggatatgatgggcaatttgttgatctgaatgggtatatcgataatggagaagttgtcgtacaagttatgaattatggagacagcattccagaagaagatttaccgtatctttttgatatgttttatacaggtgataaatcgagaactgagaaccgtggcgggacaggccttggactgtttattgcgaaaaatattgttgagcagcataacggtacaatttctgctgaaagtaatgtagttagaacaatgtttgaagtgcgattgccaaaagacgagaacttaacaatttaataaaaatttaaactttaccccactttttattttaatagttttttctattctatacgtaagttacgttaaggaggaactagaaatgaaaaagtgggtatttatttctttttttatagcatgcacagtatgtgtaggcttttatatatcaccgttatttcaaaaggaaatcgatgttaaaattgtcggaaaagatgagctagtaaaggcggcaaataccgagaggaaagagattacgaaggaacaaatttataagggtgatttattattagttaatagggattatccagtaaaaaaagatagtattaggtctgatattataaatgtaaatcataatagtgaattagtaagaggctacgtaatatttgatagaaatcttcgtttatcaaagtatgttgtaaaaaagtttttgaacgttgtcgatgcggctggaaaagatggcgtacagcatttcttaatgagtagtgggtatcgagattttaaagaacaaagtaaattatataaagaaatgggatctgattacgcgcttccagcaggatatagtgaacataatttaggattatcactagacgttggatcaacgcaaaagaagatggagaaagcgcctgaaggaaaatggatcgaagagaacgtatggaagcatggctttgtattacgttatccgaaaaataaaagtaacattactggaattcaatatgagccatggcatatccgttatgttggcctacctcatagcgcaattatgcaaaaaaagaatttcacactagaggaatatttagagtttttaaaagaggaaaaagaggtttcaactgaagtagaaggtaagaaatatactgtttcttattataaagtttctgagaatacgaaagtgaacgttccagcaaacaagcagtatgaaatttccgggaacaatatggatggggttattgtgacggttcaggaatagagaaaaaaggctgtgccatttgggacagccttttcttatataagaaaggaattgaagtttttttgtcggtaaatcgatattccttgtcgaatcgttgatatattgtaagttatgatagatataattgaaaaatcgttgatataatttcctatactattaccattttggaggagcatctttttattcactttcaaacattataacgttatatttacttctccctttttttgtgttacgctaaacgtgtgaaagacatataaaatgaaactttaatgtaagcgtattcttatggcttcttatagaaaagggtggaagtacaatgacagaacgattcgtactacgtaatgtaaaacgtgtgaacggggaagagattgacattgtaattgaaaataataaaatcgcacaggtgacgaaagctggtgctggcgagggtggaaaggttcttgattactctggtacttacgtatcgagtggttggattgatttacatgttcatgcttttccggagtttgatccgtatggcgatgaggtggatgaaattggcgttaagcaaggggtaacgacaattgttgatgcgggtagctgcggtgctgatcgtattgcagatttagtaaaaagtagagagcaggtaaaaacgaatttatttgcctttttaaatatttctcgtatcggtttgaaacgaatcgatgaattatccaatatggaatggatagataaagagaaagtaatagaagcagtagaaaagtataaagatgtaatcgttgggttaaaggcgagaatgagtaaaagtgtcgtttgtgatagcggaattgaaccgcttcatgttgcacgctctttatctcgtgaaacatcattaccaattatggtacatatcggttcagcgcctcctcgcattgaggaagttgtacctcttttagaaaaagatgatgtcattacacattacttaaacgggaaagaaaataatttattcgatgaagaaggcaaaccgctacctgtattactagatgcagtgaatcgtggtgttcatttagatgttggtcacggtaatgctagtttttcttttaaagtagcagaggcggcgaagcatcacggtattgcttttaatacaattagtacagatatttaccggaagaatcgtatacacggtcccgtgtatagtatggctcacgttctttcgaaattcctttacttaggttatccgctagaagaagtaattgacgcggttacgaaaaatgcagcagagtggctgaaaaaaccagagcttggccgcattcaagaaggagatattgcaaacttaactttatttacagtgaaagatgagaaggttacgttaattgattcagaaggggatcagcacattgctgaaagaaggattgatacgaaaggggttgtaatcaatgggtcattcattgaatgctaagtacggattaaaaagagtaattaatgcgagcggtagaatgagtattttaggtgtatccgctcctacagatacagttatggatgcgatgaaacatggtggacaaaattatgtggaaattgctgatttagtagataaagcgggagaccatattgcgagaattctagattcagaggcagcggtcgttgtgaactcagcatcgagtggcattgcgctttctatcgctggtatcgtgacggaaggaaatcgccgtaaaagtgaaagacttcatcaagaagtaatcgcgaaaaacgaagtaattatgttaaaaggtcataacgttcaatacggtgctccagttgaaacgatgatttatttaggcggcggtaagcttgttgaagtgggttacgcaaatgaagggaaagcagagcatattgaagatgcaattggtgaaaatacagcagcgattctgtatgtgaaatcacatcatgcagtgcaaaaaaatatgatttctgttgaagaagcatgggaagtagcgcagcgaaataacgtaccacttatcgttgatgcggcagctgaagaagacattcaaaaatatgtgaagtattcagaccttgccatttatagtggttcaaaggcaattgaaggacctacttctggtattgttggcggtaaacgaaaatatatcgaatggctgaaagtgcaattacattgcatcggaagaagtatgaaagttgggaaagaaacaactttcgccttacttcaagcgcttgatgagtacggcgtaaaagaagataaaagtgagcaagaaaaagaattgctacaagtacttatgccgctaaaagaattaaaaggtgtaaatgtaacgatcgttcaagatgaagctggaagagcaatctttagagcacgtattcatattagcgaaaaagagttaaataaatcggcaaaagacgttgtgacagcattacgcgaaggggaaatcgcaatctatacacgtgattacggagtaagacaaggattctttgatattgatccacgtccacttcaaggtgatgacatacatgtaattgaagaaaaattgagagaaattgtagggggaaactaaaatgacaaatattcaaaaacgtttttataaaggccgcgtagcattaaatgtattagcgaacaatacccgaaatgcgaaagatatttttgaagcagcagaagggtatgtagtagtgggggtattatcaaaagactacccaacagtagaagaagccgttacagcaatgaaagcatacggaaaagaaattgatgacgctgtatcaatcggactaggagcaggagataatcgccaagcggcagttgtagctgaaattgcgaagcattatcctggcagccatattaaccaagtgttcccttcagttggagcgacacgtgcaaatcttggcgaaaaagatagctggattaatagtttagtatccccaacaggaaaagtgggttacgtaaatatttctactggtccaattagcgcagctggagaagaaaaagcaatcgttccaattaaaacagcaattgcacttgtacgtgatatgggcggaaattcattgaaatacttcccaatgaaaggtttagctcatgaggaagaatatcgcgcagttgcgaaggcttgtgcagaagaaggatttgcattagagccaacaggcggaattgataaagaaaacttcgaaacaattgtacgtattgcgcttgaagcaaacgtagagcaagttatcccgcacgtgtactcttctattattgataaagaaactggtaacacgaaagtagaagatgttcgtgaattattagcagtcgtgaagaagctagttgatcaatatgcgtaagaaaattgcagcgtttggcgaagtaatgatgcgcatgcaagtacctggatatgaattgttgtcgcaagctaacacgttaaattactcattttcaggtacaggtgtgaacgttgcagcggcactttctcacttagggcatgaagggcttcttatttcaactttaccggaaaattcggttggagaggcagctgtatcttacattcaaaagttagggattcaaacttctcttgtttcaagaggcggtaaatatgtaggtatgtattttttagaaaatggattcggtgcacgtgcaagccgcgttacgtattcgaatcgactagaaagtagcttcaatacggcgtctgaagagatgtaccaatttgaagaaattgctaaggaaattgatatcgttcatttttgcggtattacacttgcgatgaatgatacggtgcgccatcatatgaagtctttagcgagagcagttaaagaaaacggaggaaccgtcgtttttgattgtaattatcgtccatcactttggggagaagacggatatgaacaggcaaaaccgcattatgaagaaatgctgggacttgctgatatcgttatgatgaacgaaaaagatgcaatgttcgttcttggaatgaaaacagaagagacagagcgagaggcgcaacttgttgatcttattccaaaggttgctgaaacatatcatatcgctacaatcgctggtacacatcgctctattaatagtgataatacacactcgctacgcgggtttatatgtaaagatggtgcgttcacttttgcaaaaacacttgcgttttctgtatatgatagaataggtgctggagatgcttatacgagcgggattattcatggcgagatagaagagtttgcaccagagaaagctgtttcatttgcgtcagcagctggaatgcttgcacatacaatcgtcggtgatacgcccatgtcatcagagaaggatatacttcgggcaatgacggcatcagtaggtgatgtagaaaggtagtgggtgtaacggtgaacgtaacgaggaaaaaaggaccattatatttacaaataaaaaatattattcgtgatcgaatattgcatggtgtatatgcgattcatacgaatattccttctgaaccgcagttagaagaagagttcaaagtgagcaaaattacagtgcgtaatgcaattaaagaactcgctcaagaaggatatttagaaaagaaaagcggtaaaggaacgaaagttatccgtaatacttctgcgacaaagttgtcaaaaggtaagaaatttacagaagtgttagtggaagaaggatataaagtacaaaagaaattgctaaaagcagaaatcgttcataatgaagaaggaacggtgccatttcgattattcggcaaggagagttttcgtattgaacgtttatatacgttaaatgatgcaccttacattcattatacgcactatttctcagcaggaatggcaagtacagatttatcggactttgacttgcaatcgctttatgatttagttgaagaccgaggcattcacttagaaaacttcagagatgaattcgctgttggactcgcgcctagtttcgttgcagaagcgctaggtgaaaaagaggggacagcgttattaaaacgtatgcgctattcttatgatgaagttggcgaagtaattgaatatagcgaaggctactacaatacagaaatgcagtattatgtagtgaattatgacgtataaaaaagaggggatgttggtcatctccctgtcaagtagacagaaataaaaagagtattatgccacggccttttcccgatattctatcggggaaaggccgtgtggagtgggggaaaaggtagagataacttcaaatccttacctatcactaacagtcacaaggttgggcaatgaatacaatttctaacccgaaagattctatttactacggtgttatgcatttaaaaggcgcatttgatgatgcgaaaatgctagggattaatgatttgttagccattgtacaaacatacaactttggtcgtaattatgtgcattggttagcgacaaatagtaaaacgcattctttacaaacggctgattattattctttaacagttgttgcacctgctggtggtaataggaatggaacaacaattggatacagtcaacctgtagcaattgcttacaacggtggttatcgctatatcaatggcggtaacttttattatgcagaaatggtgaaacaatatttaagttttaataacgggactgcaccagtaaacggatcagaaacctttaagaaaataatggaggaagctttgaaatataacggaaacccgtatgtttggggcgggaaaactcctgcacagggatttgattgtagtggattaacctcttgggcatttagagcagcaggagtcaatttaaatggttcagcatcagaacaatactatgcaactgtagaagttgatccgaaagatgcacaaccaggcgatttagttttctttaaagggacatacggtgggcccgatcatgtaagtcatgtagggatatatgttgatgctaatacaatgtatgattctgaaagttcagggatagggtatcaccaatttacatcaccaggatggcaaaagtactatgcaggaattagaagagtagttccaaaataaaaaaagaaatgggtgcaaaataaatgaataatatatcaaagattttaggtgtagtgttgattttatcactggcttttaacggaatactgagttatagcacaaagaaagaatttgaaaagaaggataaaaaacatcatgtgactgtagcggaaaaagagaagcaaatcggagatttaaaagtgaagttggagcaggaaagtaaaaaaataaatgagggtgcagcggacgaaaataaaaaagaaagtaatccaacagtagatttacaaaacaaatacagagaagttgcaaatcaattcgtacatgcttatttagattattcggtacaaaataaaggcgaaagacgaaacaacttgttaaaaataacggacaaaaaggtagtagatgtagtagcacctaatacagatgatttaggcgatccaaacttcaaatcacatgtaaataaggctgcaatatacattaattcagaaggtgatatttctaagaaatgtacggctttacttgatgtggagtacacaattgagggattagaaaataaaaaaacaacgattaacagtgttgtaaagataacgctagaaaagcaaggggaagaaattaaagttgtagagtataatccgtatccagcgaaacgatgaatagaaaatgatgtaaacgaaaagccccttactaactagtatggggcttttcgtttaacaaataaatctaacaggaaggagtaacatcatgcttttgagtgaactaaaacccaatcatgattatgtaaaagaaggtaggtatttaattttaagtctacgaaaaaagaaggggattcgaaaagataagtttattgaaatcccgataacatggtttgattataactttggggaaaaagtggaatggctcattgtacgtgaatatcagtctagtgttaatgggaaagaaaagtatacaaattataaacttgaaaacattcacgctcacgtgagcgtagtaaatgtgaaaggagaaacaacaaaatgaattttaattttggaatgaataaggaaggtagaaagcctgcaaatacaaaaaggaaggcgtatttatatactttaggaagttttttcacagtgttttttgtactttgtatttctcctgtttttagtggagcgacatataaatttgaagaaatgaaaataggtgagtatcagagtttgtccaccacggtaaagatttcagttgcaaaaaaagaatacaatccagtcaatcaaacgttacgaattgattatgagttaagggcagataatgactctcaaattctaagtaatatgaaatacaaagtagagaataaatacattaaacaaaaagataataacgtgaaaacgaaggtttatcgggcaagtgataactacattgtggtaattagtgaaaatgttcctgaagaatttggtgttgtatcttcggttgtgaagcctgaatatattcatcctgaattgcaaacggacgtggatgatctaaaggaacggagcttgaaaacgtacgttttagaaaatgaaaaattgattaataaagaattgaaaaaggaatcgaaagatttctatgaaaaagagtatcttgcattttcgcaacagggattgagaaaagaaatgaaagaaatagagaagaaaattgatgataaagcttcagctatgaagcaattaaaaatcaaaaatgaaaagttaacaaaagaaatggagtaccaaacagagggcgaaaaagtgaaaaccaaaaacacaataaattcaaatgagtctaccattaacaaccatcaaaaagaaattgatgtattaaaagaagacatcaaaatgaaagaaaagaaaattaaattgctgagtgaaaagaaaaaaacgatataaaaaatagtgtttttgagtgaccactaagtgaccactgagtgccacgaaatgaccactatccttaaaatatgaccactgagcgaccactcggagaggattagtgatatcaatttgagtgaagtagaaacctaataggcacagcctatttaagcgctttgtttacaaagtgatatcaggtttccttatgctcttttttaatcactgtctttagttcttaactagaaaggaggaaatacgactattctagttatgcatttatcagaaaggaagtaataacatggacatcttgttaagaggtattgatcctaaatatataaaagatattgataagaggtgtgaattaataagtgtgaaattgaagagaaagtatactcgtgcagaatacttgagaagtctcattcaaaacgatgtagaacattctttgcttcagtttaagcaagataaatttgatgaagcagtcggcaatgttaccgtgtcattagaaagacaagagaataagttacaagagtatatagatgcaactaatgaattaataatgaaattagctactcgtaattaaagacaggagagagaatatgagtgaagtggttttgtctgatacagcaaagtttaagattactagaattcataatgatattgtggaggaatacttgcaacagcatcctgagtataaaactaaagcggatgtgtttagacgtgcaattgggttgttagatgaagatatgaggaaggaaaaaggcgaggatgatgtatcacttttgaaaaaagaagtgaaaggtttaacgcaagccgttaatacaatgaaacaacaaatggatatattaattaagttaaacatggaacttattgcacgatcaggaagcgatttaagtttagaagaattggagcaggaagttaaaagtgaaattgcttctgctgttacaaagaaatcggaagggaagttctctcgaactgttaaacgtgaacctatagaagtaaacatgcaagagcaggaacacatacagagagaagttaaaacaccatcttttgcaaagaaaacattaccgatgattacggatgatgtacaaattgtcatgaaaaaaggtaaaccacataaggcaatttctagattaggacagaccatgtatgaggaaattgagtgggaacaaatccccgaacatagacgaaaagaattaacataacttgaaggagaatgatgtatgggaaaatcaccaagtatcatattaacatctcaatataccattccaaaccaaaagagttttacaacgtatgtagattattgcatgagacaaaaagcacttttaaaagagagacataccttaacaaatacagaactaaccgaactgagtcgattgcaaaatgcaattgactcttttgatatggagaggggaagtcctcattctaatcaaaagaaagtgagtgtatctgaaaaagaagcagaagcaaaagtgcttttaacttctccaaacagttttaatactacgactgattttgaaaagtatgttagctatatgggaagaaaatatgcgctagaaagcaaaaagaaaatgactaaaacggaagaagaagaggtgttattacttaataaacatatagaagatttgtctcctgaacaaatgcaggagaagataaaagcagaagaaattttgtcgggtgttttctcgaaaaataaaaatgtaattacctccaatgatttaaatgaaataaaagagttggtgggaaaagcacaaaataaaggttcggtttattatcaagatgttatctcattcgatacggactttctaatagaacagaaactatatgatcctgtaacggacgtgttagatgaaaatcggattcgaaatgcaagtcataaaatgatggaacagttattcaaggatgaacaaattgaagagaataacggcttttggtttgcatctattcatcggaatacagaacacattcacattcactacggaacagtagaaaaagaaaatagaaggaagctagtcgaagttaaagtggatggagaaactttttacgaaccaaaaggaaaaagaaaacaaagtacactagatcatatgaaaacaacttttgcgaactctctcgtagatcgtacaagtgagttgagtcgaatatctaatctaagaaataacttagtgcaagaagtcaaaaaggagtatctacaatcaaaagaaaagcaaccaagtagggaagttactttgttacaagagatatacaacgggttacctagtaacaaaaaagattggacatatggcagcaaaagaatgccgaatgaaacaagaaataagattgatgaactgacaggattgttaatgaaagaaaatcctatttttaaggaatatcaggaagctgtagaaaaagaatctagttttcagaagggtttatatggagaatcggaacgggaagaaaaagattacgcaaagaatcaaatgaaagatatgcagaagcgtatgggtaattccttactaaaagaactgaagaaaaagcaaccatatgaggacaatccgttgtatcagtttcagcaaaagaatgaacagattaaaaagaaatatgaaagggggcggttagaaaaaagaagagagtacactacatattctcaatacaaaccgccattaattcgaaaaaaggatgtccgaaatattgaagcggcgttgaatgatgatttaacaaaatggcgtgcagaacaagagtatgagcgtgtacaggaacgaattgcacgacaacaagaaatggattattaatttaaaaggaggatttaaagtggagaaaaaagtgtattattccatcgtttcaagtacaagatttagccgtaatgaagaaaatagaaccattatagaagagaatataaagaaaggagaaaatcattttctaattcggaacgatgattatggtgagtgttttgaggtggattttgagaagcagataactgaagaagaaaatgaaaactggatactggaaacggttattggttttgctgaaaaatataaaattacagaatttgagttgtggaaaaaatttgagggtgattctacatatgataaaggatttggaatagtgatagtgggttcaatggataatccaatgctaaaatttaaagaagtatactcgggttcgttagagaattggaatataagttgggacaaaggaaaacaaacttacgaaaaaatatacttcaaattagcgttgtaataatagaaaggtagtgtgtaatatgtttcaaaataatttttatatgattgatcatgttgaccaagtaaagaatgaggttcatctaagtaaatatttatttaataagcaagttatcgtaaaagtttctgaagaagaagcggcagcctatgtcgagtttatgcaaggagcagcggaacatgatagtttaccatttgttaaatatgatgaagaaagagggttaatttgcgaatgacctacacaaaaaagaaatatacacctaagacaaaagagcaaattaaagaagaaacacaagaaatcatggacaaggtttttaccgatattacgaagtactatgaatccactgaagacatgattgagttggctggattcatggcgaagtttagtaactattctcctagaaacatgcagttaattaaatcacaatttccacatgcgtatgcttgtgcgagctttaaaacatttaaagatgcaggattccatgtaaataagggtgaaaaagcaatgaaggtttttcatccttatgtaaaagaatttgtaagagatcaaaaaacaaaattagcaattccactaactaaattaactgcggaacaaaagcaacaagtgaaaactggtgagttaaaagtggagaagcaaacaaattattatttgaaagcaacagcctttgatgtttcacaaacaaatgcaagacctgaagacttgcctaaaatattcccgaatcgtcagtttaattttgaggtgacagaggaaaacaaagagttattaaagacaggtatagaggcattagcagaaaaagaaaagattgaaattaaaatgatgggcaatcaaggcgcattaattaatgaattaggtaatgctcatggtatgcatttacaagctgttgacggttctcattccgaaatagttatgaatactcgaaacaccgaaacaaaagaattagctgtatctatacatgaattagcacatgcgaagttacataatgtgaaggtggatcattcagaacacacacctacaaaagagtttgaagcagaattaacttcttatatagtgtgtaagcattacggcatggatacgagtgaatttgccattccttatatagcccaatggacgaaaaacggacaggatatagaagagaaagacaaatctattatgcgtgttcacgaaaccgcaagtagctttataaatacaattgataagaaaatttctgaattgcaaagagagaacgaaaagaatagggaacaagataatggagatataaaaggtcaatctaattctgaagaacaacagaataaggttgaccattttttatctaataaaacagaaaaagatgtagatgcagccgctataaaacagcaagaaacaagaaggattgcacgtatggcatatatgcaacaaatggagaggtaagaggacatcttaataggtgttctttttaattttaactaataaggagaagagaaaacgatgatgttttatgatgatatgggaataagtacggaagaaacaaggcaatttatggggatggtgcttgaagacttagaacattattatcattcaaaggaaggggttttggaattagctgagtttatgtctagatttagtaattattcgggtagaaatatgcaagtgattaaatcgcaattccctgatgcgtatgcatgtgcaaatttgaaaacttacaacaaggctggcttttctttgaaaaatggagaacaggaaatgaaggtttttcatcctcttatcaaagaatatgtaagagatcccaaaacaaaaaaagaagttcttgtaaaagatttgacagtagatcagaagggacaggttaagaaaggcgatttaaaaataaagaaagacataacttactatttaaagaaatcggcattagatatttcacaaaccaatgctactagtgacgacttgaaaaagatattcccgaatcgtcaatttgattttgaggtatcagaagaaaataaaaacatgttgatttctggaatccatgttgtagctgagaaagaaaaaattgaaagtaaagcacttgatgaaaatgaaaacaccttagaaataaagcaaatacctgaagtcatctatgaattgattcgtgaaaaattgcaaggtgaaaaaggaaaagggagtaaagatgaagtggcgggagattttgaaacacgaatggctacacatattgtttgtacacattacgggatggatacgagtgaaaatacagtaccttatattagtaaatgggttgaaagtgatcaagatttaaaagaaaaagattcttctataataaacattcacgatacagcaagaacgtttattaatgtaatagatcaggaaatctctgaattacaaagggggacagaaaaagaactacagaaacacaatccagtaatcagtaacgatacaaaagaattaaacgaaaaagatgcagtaaatgatgaaaaggagcaaaagaaattcgaatttcctgcttttcaacaaagagtccttaaacgtatacaagaaaaagcggaacaaaatgttgctgaaaacattgggttaaatttagggagtcattggaatgctgtctctcaacgggcagagctaaattcaaaaaatcgatggaatgattataaaattaatctttctgaagatggaaaatatatagaggatattcagccgaatatgattttgagtttgggtgaattaaatacaatcgtcaataaatttggaactgaaaaagaagtagagaatttgaaaatcgtaacagaagaaatgaaaccacattatgaagctgactcaaaagaaacagagttatttaatacacatgttgctaaagtatcggtagatcaagataaaaacatgaaggttgaatgtatttctgaatatgtatcagacagtgacattgaatttgattttaaccactctgtagctgaagcgattgatagtattaattcttctattacaaaagcgcacaaagaagtaatgagcgaagaaattgaacgtcaaggaagtaatcaagaattgagtacaggacaacaagatgaagaagcagccgttatgaaaaagcaagaagctagaaaaatagcacgtatggcatacatgcaacagatggagagataaaaggacaccttaataggtgttcttttttattttaaatttcaactaataaggagagagaaaaatgatggataaccataaagtagtaacaggcattcaacaaaaagcagctctagagattgacgagaaagtaggtattgatttagaaaagcattgggaaaattacgaaattcaactgtccgaagacaatcgagtaatcgaagaaattcatcctgatatgcgtttgagtttaggagaaatgctatctgttgtaaatagatgtggaacggaaaaagaaatggaaaacttcaatcaaattgcagattaccttgaaccgtattatgaagctgaacttattcaaggagaattctatgatacgccaattgctaaagtttcaacagatagacaacaaaatatgaaagtggagtgcctatctgaatatgtatcagacagtgacattgaatttgattttaaccattctgtatttgaagctgttaaacatatcaatcattcaattactaaatcacacaaagaaattatgaatggtgatgtggagtatcaagggctttatccagtaaatgaagatatggttatttactgtgaatcgacagggaaaccattgcagcaggatgaagcggcttatcactttgagggctatggatatgtagtagcagaagaggtgattcctgaagagatagagggaaaagatgcttattatacaacaatcggctacgaagatgttgaagaaaaacgacttgctcctcttagatatatggaagaaaagaagattgaagatggagaactttgtttcaatccagtagaagagatcgtaaatgatcgaaaaagcgaaacagaggaagtttttcaaatggaatccgctaaaacagtcgggtcggtgaagaaagagcatggcgctatagaggtacaagaatcaaaaaccatccctgaagttggaaagcgatatgttgggaaagataccgtccatgaggaagaacaacagcaaatatcgcaaacaagagagcaagcaagaaaacattatatgatgaaacacatgcttggtcgggattattaatataagaaagtgggataaccaatgaagtataaaacgcatcttacaacaagcctagcggtcgccctgcctgtcttggcatcaacgggaaacctcacgattggaaatgtgatagcggttagttttggggctttgttgcctgatatagatgaacaacattcatggattggcaggagaactcgtggagtatcggacttaatgaatatggtatttggtcatagaggaatcactcattcactatttggtttagtgcttgtgttgattcctattttatttgcagtcgggatgacaccattgacctttacgaatggcatgtgcatccttgcaggatactttctacatctagtggaagacagtttctctaaaaaaggtattaagtggctgctgccattatccaatagaaatttccaaagtggattccatattttttactacagctataacggtatagcggaaaaaatgattttaatgattagtacgattgtagttgtgtatgagttgtattcatatggaatggcaagtttccaatttggggcttcaggcattttagaatcctttaaagcgttatttagttaaagcagaacaaatacaaatataaataaatcgaaaatgaccatgtgaaaatgcatggtctttatttattggaggaattgctatggaacaacaaaagaagaataccaaaagatataccgaggaagaaattgaaaaggcagcatcacttgatattgtggattattgtatgcaaaacgatatccctgtaaagtctgacagtgaacgttattaccgtttagcggaacacgatagcttaatcattgataggaagaaaaatcagttctactggaacagtagaggggttaacgggaatattatcaagtttgtacaggaggtagaagatgcttcgttccctggggcgatgcagcgattactggacggagaacaggactatgaaaaagcttcagaggttacatttgtgagtgagccttatgattgtgaacattttgcggaaaaagaagtacctcaattcgatagagcaagggaatatctgactgaggaaagaaagattgatccgcaagttgtagatgcattgcataaaaaaggactgattaaacaagataagtacaacaatgtattgttcctatggaaagaccgtgaaacgggagcggtaatgggtggatcagagcaaggagtcgtaaaatcggataaatacaaacgtggggcgtggaaaagtatccaaaaaaattctacggctaactacggttttaatgtattgcagggcgaaccccgaaatctaaagttctttgagtcctctattgatttactaagctacgtatcactacataaacatgaccttaaagatacgcatttagttagtatggaagggctgaaaccacaagtagtatttaattactatatgaagagtcaagagcggattggtgatgttcctgacagtctttcattatgcgttgacaatgacaaagcaggtaaagcttttgcggaacgattgatacattttcgctatgaaaagaatgatggaagcatagttgcatttaagccggaatatccgcaagcaccgtctaaagaacaaaaatgggattggaacgatgaatgcaagcgagtagccaatcaacgagaacaaggaagacgtacagcttatttacaacaaatgggcagagagagataaataatcgaaatgtaattttaaaatgtgtgaaatgaagttgaaaatgttgatttttattagtaaaccgcatataataaaggtacaaaattagagtaaccttactttagtaggtgcgaaaaaattggtgtaactctaccgtagtgagtaccaaaaaattggtgtagccttaccgtagtaggcgctaaaaaagaattttaaaagtagggagagttttcttcctactttttttgtttctagggggagaagaaagttggctaataaagataatcctaaattctacaccatttcaactgaatatatagattatttaagagaaacggatagtaaagtaccttttaataaagatgaacagcatagtagaccgtatgtaggtgtattggaaaaaatcaatggtcatgattattttgtacctttaacatcacgtaacgataaaaattttaacagtcaggtcagtgtgaaattattcgatactgatgaaaagcgaattggagttttattggttaataacatgattccagtcccagaaaaagagtgtaaagaaattgatatagcagaaaaaacagcagcagaccctcagtatggtaatttgatgttaaaacagtatttatttttaaaagaaaatatggatcgagttactaataaagtggaaaaagtatataaagatgtaactgtacaaggaaagccttcacataaacaaaaattcttaaaaggagtttgttgtgatttccctaaattagaagaaaagtgccaagaatataaagaaagagatcaagctaaagaaagagataaagctagaagaatagcatatatgcgtcaaatggggcgtgagagataaaaaggacaacatagcgttatgttgtcctttttatatacaaaattttattagtgagaggaagaagaaaatgaaatatcaattagaatacgataaagttttaacaacgaaaaaagaatttgttctagaaaaaacaggagagattatttctggtgtttcaatgttaattcgttttggtaaagtttttgaaggaaagccttcagatggcttatatacatattttgaagaagcggattcaactttgtcaggactattaaggatagcttatgactctgaaacaaagaagtttgatttttactcacatgatattctgggggacaattatgaagttgttggttatacaaaagatgtaggtgtaggatttacagaaggtcattttattagtaaagaagaatttgaagagattattgagaaatatggtcacttctttgctactgataattccttacaaaactgtgcgtattgggttcatgaaattgaagaaaatgataatcaaaataacgaagtagaaacaatcgaagaatatttttctatggctttgggagtatctaaatcagagacgtatggatatattgcaagatatagtgaggaagttccggtttggtgtttccttttaaaacgtgatggtgctaaaggggagaaatattatggtgagcactgtcctttgaataatataaatctagaagatttgataaaagtattttctttgttttctaagcaagatagaaaaataattgtagatacagaaggttatttatacaaagacagggactacttatttaaaaatgagtttgtattaaatccaaaaccattagaaaagaatgctctgaatttggaacacggtacactagaggaatttattattgaggataatttgtatgactctgataaagaaggctatggatatattgtaagggctagcgaggaacaaccagtttggtgcttgttcttaaggagtgaggattctgatgggaataaatattgtagtggacactaccctttgcatattacggatatggaagatctgattaaagttttttcctggtactcaaaacatgagaaaagattaatcgtaaatacagagagctacttttttgcaagagaaataaaggaaatgaactatccaaatcgggtagaaaataattttttaaattcaactagctatttaattgaaaaagagtatgataatcgttttttaattcatcgagaattagaagatgacgaaattagtagatattctgaagctgaaatatgtgtatacaatggaaaaaaatacttagctgcaattgtagtttgttcttcagaagatgaagcggtagccgttgtaaaaagttattggagagcaattgatattttgattgaaggtaaatgaagagtgagtagtaatataaagcgaagaatcaataaaaacagtaagagcaacgtagcgatatgttgctctcttttttgtatacaaaatttaaaaggaggagatttgaatggagaagttagaaattgcaaaagaattactggaaaatagtttgaatgtttatataaagataaaaatagaagaatatatttttcgttttgaagggcttgaaagtggagtttattgcaataaacagaattttgaagatgactcaatgattcgttttcacaactgtattacttatatccacgagacaggttttaatataaagggctggatgttgtatgaaattcctatttattattctcattgtttttataacgaaagcattgggaaaaggtttgatttaatggtattaaatatcggtgaagtaatgccagcctatttagattactcagaagaaaaagctgctgaaacaatagaagaagctatagaaaaatatatttattaacccaattatgataaatgtacacaaatacacatttacacatgttcacatttttaggagtagcataattcatgctactcctttttttatacaaaattttaataatgagaggaagtaatacacatgactacattaattattgcggagaaaccatcacaagcgaaagcgtatacagaagcattcccgaaagttgagaagaaggatggctacttttctattgcgccttgttccttaatgccgaatggagcgaatattacatggggatatgggcatttagtggaattgaaagcaccacaagattataaagcagagtgggaaaaatgggatatgtcacaattgccaattttaccggagcgctacggatataaagtatcagccgataaaagaaagcagttcaacgttgtaaaaaaattaatgaaggaagcagattgtattacaattgcaacggatattgatagagagggtgaagcaatcgcacgtttaatcattcaagaagcgggctgttcttctaaaaaaatgaaacgcctttggatcaacagcttagaagtggatgaaattaaaaaaggatttcagaacttgaaggaaggctcggagtttgagagtatgtttgctgaagcacaggctcgtcaaattagtgattgggcaattggtatgaatgcgagccgattatatacgctgttattacgtcaaaaaggcgtacaaggtgtttacagcgttgggcgtgtgcaaacccctgttttatgtctcattaaccaacggcagcaggacatcaaacactttaagccatcccctttctttgaactagaaggacagtttaaagggatgaacggaacatacaagggaagatacaaagagcgattccaaacgaaaaatgaagtggaattgctactgaagaaacatcagctgtctgaaggagcgaatcagcaaggtgcagtaaaatccgttgaagtaaaaccgaagaaacaagaagcgccaaagttgttctctctttcttccttacaggctttagcgaataaaaagtacaagtattcacctgccgatacgttgaaaattgtccaagagctatacgaagcaaaacttgtgacctatccacgaacagactgtaatttcattacagaaaatgaatttgcttatttagtccgaaacctagagggatatcaatctattataggagtatccttccaaccaaaatcattagatccgaataaacgctacgtcgataatcaaaaagtacaggagcactatgccgttatagcgactaaaaatgttccttcgaaacaaaaggtagatcaattaacggacaagcagcgcaacttgtatacggaagtgttaaagagtgtgttaggcatgttccatgcgccttacgaatatgaagaaacaattattacaacagatatgaatgggttagagtttacgacaaaaggaaaatcggaaaaagcgttaggatggaaagaactttataaaacagatcaaccaagcgaagaagagagcgaagacagggaatccctccttccagttgtacaaaaaggcgaacttgtacaagggaagatacagacaaaagaaggcatcacaacaccaccaaatccttatacagagggacaacttattactttaatgaaaacatgcggcgcttcagtagaagatgaagaaagtaaaagcatcctaaaagaagtagaaggacttggtacggaagcaacacgagctggcatcattgaaacgctcaaaaagcaagaatatatagaagtgaaaaagaataaagtgacggttacaccgaaaggtgaaattctttgcgaagccgtgggcggcacgttattagcgaagcccgaaatgacagcgcaatgggaagggtatttgcgtaaaatcgggaagaaacaaggctctaaagaggtgtttgtagcgaagacaggggaatttaccaagcaattgatcgtcaacgctacgaagtcaattggtgagcttcagatagatagcaaagtacaagaaatgaaaacaaaggattccgtagggaaatgcccgaaatgtggcaaaggcatagcgaatcgcaaaacattttacggttgtacaggttataaggaaggttgtaagttctctcttccgagcgaatttttaacaaagaaaattagcgaagcaaacgttaaaaaattattaacgggtaagaaaacaggattaattaaaggaatgaaagggaaatcaggaaaagaatttgatgcgtatttgaagcttgattctagcggaaagatcacatttgaatttgctaaaaaataaacgagaatcatagtaaggggagaagaaagttgaatgtaaaaagattagtagaaaagggaaaatgggtgttaatgacgactggactagctatcgtgtccactctctttttttcctatataaaaagctattttggaatcgacacaggcaatgcagaacaggtgaatgcaaaagtagaattgaatatcttctatttaattgtccctctattaattgctcctgtaattgaagaatggattttcagaaagattctaccgtttggaatagaaaaactgtttgaacgaatcaatcgtacaacagcgattctcatcgctaatggtatctttgcagccgtgcattttgattggttcttcttcccttactttgtaaatggttgtttatatgcatggagttacgaaaagaccagagatataaaagtaccaatagtagcgcatatattatttaattcatttgtatttttggctacaagcctttattaaaaatgtacacatgttaacatatatacatgtccacaatatcgaattactctcacgttataaccaacaatgattggttcttcttccacgtctaatttgaaaattggagtgatatgaataagttaaaagcgcaataacataacgttatggcgcttttaatttggctttattttaatcatttgcatttgaaaaatgtcgctatccgttatgcctaatacttgcatttcttcccttaatgaacgccacgactcgattttaatagatttagtagtctggtctcgcaaggtgtatttgtgtataaaatatgactccttatttttcttcatcttaacacctccatctcacctgaaaaatctgtagctatataaaatttatatagcaagtgcagtgttttaacccttgttctcgttagttttctcatagtatgtatagtacctttttaaggatacgtcagttttaaagccgacttgcttaacaatatcttcagctgtgtattgctgttgaatcatctttaaaataaaggtatttcgaaaatgttgtgcagaaatccctttccttaaatttgctcgttttatctctaaacgaatcattttttgaactgacatgtccgttagaaattttggtgcgtcattgtcataactccaaagataagtccccaacctaaagtgaaaagcaacaaagagtggatcatcactgtgatatcttgggcgtactggttcgggaatagttttatagtaatgatataagtgtaatttatctacttcttttaactggattgtacgattaatctttgtgtcttcaggaatagatagtgtattgttctcaaaatgtacatgtttcattcgtaaagcgacaagctcatgtagagataatccgtagtctaggagcaagattataatagaaagatttcgttctaaaatcataggacggctagttcgttgtttttctgtcagcccctctaatgatgcggatacttgttttaggcgttcctcttcttgaatgctgataaagtcttcagtacgcaatgcacgatcaggtggagctatgtgaacaacaccttcaatggggctaggtaaatctaaatattcgtacagcctattaagaacgatgtaaatacgatgtaccgttttatcggagtattggcgttcttctattaaataattaaaaaatgcttcgaaatccttcttatatagggattcccaattcatttcttcagagtccgagaatcttcctgattgatgcagccattgaatacagctttctacatcatagatatatcgcttaatcgtagagggttttcgccctttatttaataaataagatgaaaatccttgtattgtatcttggttttttcttgtaatgttattgatttttattcctcctatcttcaaatcttttaaccactctataaaatgtagggctactcatattacacatttccatagcatatagcgctgttatctgtccgtgtttccacatattataggcattaataaattctggagttatttcagttctgggtcttcctaaatgttttccttttttctttgcagcgtcaataccctcacgttggcgagtttttatttttgttcgttcctcttcagcaagccacgataagatttgaagtaccaaatcagtaataagagtccctaaactatctttatattgagttgtatctaaaagtggcatatctaatacgataatatgagcctgtatattttgggtaatatctttccattcctcaaggatagcttctttatttcttccgaaccgatccagggaatggatatataaaatatcatcttttcttaacatgcgttttagaagttggtattgttcacggttaaagtctcttccgctctgcttatcgataaaaatatctcgttcatcagtgatgagtcgtttcatcgcttcaagttgacgatcctcattttggtctttgctactgactcttatatatccaaattttcttgtattcaaaataaatagacatcccttcaaaattggttctactaaaattataacaaaaatacttcaaaaggtatctttaattttttaatacttcaaaaatacggtttttaaccttttgaagtattaaatttaatagagtttaatgtacttcaaaaggtgtacctttcaggatagttgtagttgactttttgtttaagtttatagtgttaaaaattctatttttttatataattatatatttaataaattatctaaagatgataatacacatgagtgaaataaacgacactgtgtctgataatttttttggcacctgatattactcgtaatgtggaattcgatatatcaatagtagacaattcaaatatatagaaagagggtctgagatttatgaagaaagaaaagcgtaaaaaaactacatcgaaataaaagtgaaagaacaaaaagagaaaattcgtttggaagaaaagagaaattgtgaatttgatcggatgatgtgacttattgatatagcggtgagaattctaatgtggatattcaaagattaaatagaagaaacatgatgaagcaagagagaagaaagagtgtatgtttccaaagagcaataatatttattttcacattaaaaaaagaatgcagattaaatatctgcattcttttttattactattaataaatgctcattgttacgtaagcagcagggtatccaccaggattaggttcaattgcaattcgaataccagtagcttgtccaaatcggacttgtgttaaagcgttttgtaaaaaactaactctcttttttaaagctgtattaataaatgcaagtgataatcctactgactttgatagtgctggtccaagtagtgctattccttgagaaagtatccaatcaccaaggggttttccggttggtaatgatgataaagaacgacataagacaccttgtaattttgctttattccaatatacatattgagtttttgcagcggctaagggtgctagactattaggagaagttgaatttttaaagtcattgatttgtgaaggagtaaatcctagtgcttctaggtctaaatcgttgatatcgttgattggtattttaatttgattaagatcatttgattcttgcgtttgttgaattgtcgtgttttcaatagtatcagctgctaccttgttttcgctaaaaattgagagtgttgaaaccaatgttaatgcagtggcacaaacagataaacaaattttattttttctcataataacctcctatttttagaaaatttttactataataggattatacaagaaataaataatgaaaggaagatattttttggaaaaaattctattattttctatttattttttgagcatatttattggtactggattgatatttttatgggatatagttacttctccacttggttatgcagggatctatgtagcaattttacttattaattcatttgcatatctatttttaaaaaacagagtgaatagaaaacaaaatatgcaaattagtgtaattgcttttcttattgctgtagtgccgattgtacttctttacaattattaattagaatatattttaaagttagaaacttgaggcaaataaaaaaagagagggaagttggtcatctccctgtcaagtagacagtaataaaaagagtattatgccacggccttttcccgatattctatcggggaaaggccataaaaaatgcacctccaattgttagactgtgtctaacaattggggtgcacttcatattagatggcttttgtatgttacgtgtataaagttatttgaaaataacgatcgaataataggtgagattataacaatatttgtgtaagagaataaaaaatgtagataatttcgattttcaaaaaaatcaatttgaaaatatgtttttattttgcaactaaatatgttactatatgtgtgataaaaacaaagaggtctgacatctacactccacataataatactctaatgatttgaaaattcaaaaaaatcaaaatttaaaataataattgtattaatgattagagtaaaaataaggggaatggagaaattatggagaaagacactgctttgtaaggggcatattttatcatcttgagcagagaggaggatgcatagcatattgtaaaatatagagataaacaatgaaaaagtgctatgcaaatgaagagcatgaagggacgtttaaggccaggtgatacggtagcaattggtttaatgctatttgcattatttttaggagcaggaaatttaatttttccgccagttttaggtcaacaagcaggagagaatgtttggattgctacaataggattccttgtaacgggagtcggattacccctactagctgtaacagctgtcgcgtttgtagagggggacttgaaagcgctatcttctagagtccaccctatatttgcgtttattttcccattgattagttatttagcaattggaccatttttcgcgattcctcgtactggagctgtttcgtttgaaatgggtatgaagccgtttttatcagaggcaatggtttcagagtggtacatgctatttcttttcacgatagttttcttcggaataacgtggtatttatcattaaatccatctaaattagtggattggttcggaaagtttcttacaccattattagtattaattgtcgctgttattgtcggaaaggcaattattgatccaattggagagccagctgcgccgttagctgcttacaaagaaaatgctttctttggtggatttattcaaggatatttaacgatggatgcaattagcgcgctcgtattcggaattgtcgttgtacaagttatccgctctaaagggataaaagagagtagtcaaattgcaaaaataacagtagtatcaggtattattgctgtacttggtttaacgttaatttatttatcacttgcttatcttggttcaacaagtacatcacttggtatctcagaaaacggtggtcttattttaacgaatgttgtaaatgagctatatgggacgagtggtaaaattttattagggcttgttattatactcgcttgtttaacaacttctgttgggctaacatctgcgtgtgcgggtttctttacaaacttattcccaaaactttcgcataaaacgattgtaacaatggtatgtgtatttagtttaattgtatctaacctaggtttaacgcaattaatcgcagtaacattacctgtgttaatgatcatttatccagttgcaattgtattaatcgtactttcttatttccataagtggattgggaagcgtaatacaatttatattggagctattttaggtgcattgttaattagtttctttaacggtttagaaagtgcgaaaattaaaattgacgcgatttctaatgtactacaaatgttaccgttatataacgaaggaatcggatggttaattccatcatgtattggcgggattctcggtttcttcttctataaatcaaatgaatcaagtgaattacaaaagaaaggtgcttaggcacctttctttttttgaaggggatttttgtattttgtctaagtaataattggggggaatgataaatggctaattttgaagattttttaaatttggatttgagaattggaactgtaatacatgcagaggaatttaaagaagcgagagtaccagcgattaaactagcaatagattttggagaaatcgggataaagcagtcaagtgctcaaattacgaaaaggtatagtccagaagatttaatcggtcaacaaatcgttgctgttgtaaactttccaccaaagcgtgtagctggattcaaatcagaagtacttgtgcttggtggtgttcctgaagctgatgatgttgtgttacttcagcctaatatgaaattgccaaatggaacaaaaattagctagggtgaaggtaggggctaatatggatatcggacgagaatatttacaatgtgcgatttcgaactttaaagcaacaaagaaacaaggggaacgggcactttctcaattatcatatgaacaaatacaatggtcttctcatgaagaaacaaatagtatagcgattattattaagcatctgcacggtaatatgcgttctagatggacggattttttaacgtctgatggtgaaaaaacagatcgtaatcgagatggtgaatttgaaggatgctatcactcaaaagaagaaacccttatagcttggcaagaaggatggaaatatgtttttaatacgatgaatactttaacgccggaacacttattgaagacggtatacattcgcggtgaagcacatactgtcatgcaagcaattgaaaggcaaattgctcattatgcattgcatattggtcagattatttacattgggaagatgttaaaagaaaatgagtgggaatgtttaagtattccgagaggtcagtctgcgcgttatgtagagaaaaaacgttcaacataataataagaaagaaaccgataaaaaatgggaaaaaagaaagtcagccaaataatagatggttctgtaatcataagaatactgccaaaaataattccatatataataagaaagaaattgaaaagtgtattcacagggagaaatcgtgagataaacacttgctgtcgtttaaaacaatcactgtgaaataaataaaagcggaagtaccatgtggctgtaataaggtctttctttctcacaattctttttttgcatgtatgacagataaatggtggttgcatttcattacgctccattttttattttcataataatgtgagacaaaagtaggtacaaagtgtatgttcctatatacgctcctgcaataaggaaaaatggattcagtaaaattccatgaatgctcgtcatgaaaactaaatcttgtattaaaacatcgtatatattaatggaaataattgtaccgagtacatacagtgccaagtacgcagaaatatgtagcacaatagagatttttggttgcttagcggacaaataaaaaatgaatgatagagcgattggtaatattcctattaatagcttcaattcatttcacctcattaacaatatagccggaattttaacggtctattctctagggcttgtacataacttaaaatagagaggtgatagtatgaatcggggctttttttttatgaagtttacaaatatgcgtaagttagttttatttgttattactacaatgctagcgactttttttcttattagtctgatggtaacctctatgaaagagacaaagtcaacgtatttatataattggttaaatgagttatcgatgaatggttacatgtatgtacttggaaaagagaatcattattttacacaggagtatcgaaatttgaatcaagatttttcaatttcttcttttctcttttctatggctacaaatattcgctttaatgatgtacgcagtttcgtcgggaaagagctcccggggtttggtaagtacgatacagaaattgttattgcgggtgagggtacaaattattctaacttaccgatagagtcgagtgttcctcttgaagaagtagtgaaggaacggactagtggaactggacaagcacctaaacaagatacgagtaaagagaaaaaacagccgtcccaaacgaccgggaagagacaagttgcgtttatttatcatacacatagctgggaatcttatttacctttacttaacttaacgaatgacccggatccgaataaagcaacgagttctgtatcgaatatttctatattaggagatcgtttccgtgaacaactagaaggagaagggattggagctactaacgataagagtgatgttggtcaaaagttaataagtaaaggtttaaacagtaatagttcgtataagatgtcacgagaaattgtgcagcaagctatggctggaaataaagatcttcaatacttttttgatttgcatcgtgatagtgcccgaaagaatgtaacgacaaaaacaattggagataaatcatatgcaaagcttgcatttgtagtagggaaaggaaataaaaactatgaaaaaaacttacaattagcgacagctttacatgaggcgattaataagaaatatccaggagtgagtcgtggggtcattcaaaaagggttccagacaggaaatggaatctataatcaagacttatcaggacaagcgatattaatagaagttggcggtgtagataatacagtggaagaattgaatcgatcaattgatgcacttgctaaagcatttggtgaatatttttggcaggcagaaaaagtgaatggataaagtgaaacgtgaattagccaggacatctatcgataattattagctcacttcaatcttgaaaaaacgtaagtgtaatgcttgcgttttttctttgtaatggtgagacgtcacagaatagacataatttgtcgttgttatagtaatatcgaaatttgtcaatttatagtaggagatttacaaaggaattttcgggaaagtagagaaaatctttttataaggaaaactttttattatgaaactggtagggtgattgaagtgattagggaaatcgaaatagaagatgcagcatcatttttgcaattaagtaagcaattagatgaagaaacgaagtttatgctatatgaaccaggagaaaggaaaactacagctgagcaacaagaaaaaatgatccatcgatttatggaaaatgaatatgcaacaatatttgtagcagttgaagatgagaggatagtaggttttatattagtgaatggaaataacattcaaagaaagaggcatgtggcaagcattgtaattggtattttgcaagagtataacgggcgaggtattgggactagattgtttaaagaggttgagaagtgggcaaaattacatgatgtatggcgtttagaattaacagtaatggcccacaatacaagagctcaggcactatataaaaaagctggatttgagaaagaaggtgtcaaaaaagctgctcttattatcgatggaaagggcatcgatgagtatgaaatggccaaattattaaaataagaggtcgttatatgaaaaaaagatgggcactacttggtattgtagctgcaataattattattggagtagcaggaatcaattataaaatgtataaggataagcaggcgcgggaagtaagtgtaaatagcatatttccgaaagcgaaagaaacgattgctaatatggatggggatattgcggtaattaataatccgaattcaatgcttgtacttgtaaataaaagtaggcgtttaccagatgggtatagaccgccagatttagttattccgaaagtgcgctactctagtgaaggtgatcaagaaaagaaaaagatgagaaaagaggcagcgagggcgcttgaggatatgtttcagcaggctgacaacgagcgtatttttctttttgcagtttctggatttagatcttttgatcgacaaaaagcattaaatacgatgtataaaaaacaagacggggaagcaaaaacagcaatgtctagcgcggttcctggcacaagtgagcatcaaactggactagctatggatattacgtctcaatctgctaaatttcagttagagacggtttttggggaaacgaaagaaggtcagtggctttctgaaaatgcccataaatttggttttgttgttcgatacacaaaagcgaaagaaacgattacgggttatcggtatgaaccatggcacgtaaggtatgtgggaaatccacaagctacatatttgtatgataatcaactgacgcttgaagaagtaacagagtaaatgattgaggggagagacgtataatgacgatgttatataagaaaaaagtacatgcatatattacaagagaaaaagagggggttatgcaattacttgtttttaaacatcgtgatatacatgaagctggtattcaagtgccaggaggaacggttaatgaaggtgaaacgttagaagcggctatattgcgtgaagtacaggaagaatccggattgcgtcatttatgcatagaacgttttttagcagattacatcatacatatgaaagaaaaacaggaatatgaaaaatgccacttttttcatgtaactttactaacagatgtaaaggatacttgggaacatattgtaagtgctggtgaggaagataaaggattagtattttgctacgaatgggttgatattgcaaaatgccctgaattagctgggaaacaaggtgagtttttacatttgttagatgaagtatacgcacagtaatgtaagagtctgaagcgaaggttaatccgtttcagactatttttatttttcggtaaattaaaggtgtttaaataaggaaattgaatttctttaaaggaatattaatttaggatgtgttgaggtgaaaaaaatgaaaaagtaaggggtatacgctaaaaaagttcatataagggagaatataaatggaaattcagtttaatccaatcttaaaaaaggaattaacaattcaagatattcaaaatgaaatggaatcaggaaagttaacttcaaaagagctagtgatgtattatctttatagaatcgcaaagtatgatcaagacggaccgaaaatcaattcaattttagaaatcaatccagatgcaatttttattgcagaagcgttagattatgaaagaaagacaaaaggtataaggggtccattacatggaatacctgttttgcttaaggataatattgaaacgaatgactccatgcatacaagtgcaggtacaatagctctagaacaaaatataagcagtgaagatgcatttctcgttactcaactgcgagaagcaggggcagtgataattggaaaaacgaatatgacagaattagcaaatgcaatgtcttttgaaatgtgggctggatatagtgcaaaaggtggtcaaacaatcaatccatacggaacgggcaaggatcatatgtttgttggcggatctagtacaggatctgcgatagcagttgctgctaactttacagtagtatctgttgggacagaaaccgatgcttctattttgagccccgctgttcaaaattctgtagtaggtattaaaccgactgtcggtttaattagtcgtagaggaattattccatttacttattcacaagatacagctggaccatttgctagaacggtaacagatgctgctattttgctagggagtttaactggagtggatgagaaagatgtagttactcgaaaaagtgaaaatagggcatatcgggattatacatcttaccttgatgcaaatggtttaaatggagcgaagattggtgtgtttaacgatgcaccaaaagattattacgaaaatggtgagtatgatgaaatcttgtttaaggaaacgattcaagtattacgtaatgaaggagcgacagtagtagaaaatattgatattccttcttttcatagagaatggagctggggagttccgctttatgagctgaagcatagtttagataactatctttctaaattaccttctactatcccggtacattctatttcggagttaatggagtttaataaaaacatagcagaaagagctttaaaatatggacaaactaagttagagggaagaaaagattttcctaatactttacgaaatccagaatatttaaatgcgagattagaagatatatatttttctcaagaacaaggcattgattttgcattggaaaaatataatcttgatgcgatactgtttccttcctatataggttctactatatgtgcaaaagcgggttatccgtctatagcaataccagcagggtatatggaaagcgggaggccttttggaattaccattgcaagcactgcctttagtgaagggatattaattaaattagcttatgcttttgaacaagcgacaaagcatagaaaaatcctcaacttatcatgaatagaataaacaaagaggacaggaatccctgtcctctttgttttagtgattaaattgaaatatcgttctgctctgtcttatgatattttaataaactaaaagataaacaagcggaacataaaataagaatagaagcgatgatataaattgtacgaacaccgaacatatcagtaataatgccaatgctaagcatagatagtccagaggctgttgaaagaagtgcaccatgtgctgtatacattttggataataaagcaggggcgacacttgattgtaaaacagtcgtttgggaaatatctctaatttgataacatggtcccattagaacacatagaaaaagcgcaataaatccgctgctcgtcataccatataaaaatgtaagaatgctaaatataagagagccaatcgacatagatcgtattaaattgttttgaatataggaactcattttccatgctaatagaccaccgattaacgtgccaacataataacttgtattaatatatccccaccattcttcgcctttatgaaggatagtcgtaacgtatgccatcgtaatagcaccaatccatattgtccctgcgaaagtttcgattaagtccatatatgtaacggtacggagagaaggattttgaaataggagtttccaaccttccaataaaacagtacttttggaagagggagaatctgctattctttcagtatgtatggaacgtaatgaaaaatgtaaggcaatgcatccgaaaatcattaaaatgttattaatcatgagtgtagaagtagcgccaatgagaagaacgacaatactcgtaaatgaataagcaacggcttgcacaatttgtgttgaaaaggaaaagatactatttacttttactaatttttctttcggtgtaaggcgcgggagaataccgtataataacggagcactccacccactacataatgaaatgacaaaaataaaagttaatagagctataatgtttgtggataagaccgggaacaaaatcattaataatagtaaaaagactgttttcagccattggagcgtatataacagcgtataagatggaaaacgatttattataagtggtgcagagatgttagcaattagatttgtgataacttgtaataatggaaaaagagcagtaatagtagctgatttagttgctatataaatatgagttgtaataatcattacatatacgatgtcagcgagagtaatgcatattttggaacctaaatagtagattagtgacaggtttctcaataagattatcacctctataaaaaatagtatttagtaattagaataattgtaatttaaaaattaaaatttttaaagaatttaattttttgtcactttttgaaagggattttcatgtataatgaaggatatattgatatagtattatattaatgatcattgtaacagtgagtatgtacaatagcttgtagcaaacgcccaagtgtaagaaagggcggataaaccattcttttcttcatatacatatagaaaatgagaaagaaagtgagggttgcatatggctgcttgggtaatttggtttataatagctggtattttatttatcgcagaaatgttgtcgattacattttacatgctttggcttggaattggagctgttgtcggaggtcttattgctttgtttgctcctgatgcactactgttacaagttactgttggtgcaattgttagtttaactttgacattctttacgaaaagaatttcaaaaaactttcgagaagcaaaaggttttactgatacagtagatatgcttgttggtaaaaaagggattgttatgcaaacgattacaaatgaagcgaatggtattgtgaaagtggatggagatacttggacagctattgcagattcttcaattgatgctggagaaaaagtcgttgttataaagaggcatagtactatattacaagtgaaaaaggagagtgaataaatatggtagcattaacgttaacgattatattcgcactaattgtagttacatttatcgcattaacaattaaaattattcctcagcaaaaagttggggttgttgaaagatttggtaagtttcaacgtatcatgcacccagggttaaatattttaataccaattgtagatcgtgttcgtgtatatcatgacttacgtattcaacaaacgaatgtaccaccgcaaaaggtaattacgaaagataatgttcaagtagaaattgatactattattttctatcaaattgttgaaccagaacttgcgacatatggtatttcaaactatgaatatggtgttcgtaatattacttcagcaacgatgcgtcaaattatcggtaaaatggaactggatgaaacgttatctggtcgtgaaaaaatttcaacagaaatccgcttagcgcttgatgaagcaacagaaaaatggggcgtacgtattgaacgtgtcgaagttgttgatattaacccgccaaaagatgtgcaagcatcaatggaaaaacaaatgaaggctgagcgtaataaacgtgcgattattttagaagctgaagcagcaaaacaagataaagtccttcgtgctgaaggggaaaagcaaagtaaaatcttgatggctgaaggggataaagaagcgcgtattcgcgaagctgaaggtataaaagaagcaaaagaattagaagcgcaaggggaagcaagggcaattgaagaaatcgcaaaagcagaacaaaatcgtattgaattgcttcgtgaagcgaatttggatgagcgtatacttgcttacaaatcatttgaatcattagctgaagttgcaaaaggaccagcaaataaagtctttattccgtctaatgcaattgaaacacttggtactcttggggcaattggagaaatatttaaagaaaaacaagtgaagaaactaccttcaaatgatacaggaaaagaacaataaaagtgaggaagagaaatgggataccatttctcttttttttgcgtatattccgaaaagcttgtacatatccatgtataaagaaggtgatgcagtgaaaaagtatgcaactcgaatacatgggaagaaactgatttcgttactccttttatatgcgctaatagtaattatgatagcgtcgattttgacgtcatttttacatacaatgaaatcgaattatgcaaatcaatggtttggaaaagtatcgatgcaaggttttgttcaaatgatagaaagtgagaatcgctattacggatttgattattttaagaagaataaaagagagtcagttggaaatttaatgttctctattgcgacagatttgaaaattaaagatttaagaacattcgtcggtaaagaagtacctggtatgtcaaagtattattctaatattatcgtagctggggaagggacaaacttgacgaatatcccaaatgaatctagtgtaccgattgaagaagtaacgaaagaacgggaagtagcaaaagataaagttacagaagcggaaaagaataatccggttcagaaaaagaacggagcgaaaaaaggtgaaagtgcagtatatatttatcatacacatagctgggaatccttctttccattattaccaggggctacggatccatcaagtccagatgtaaatgtgtccttactagggaaacgtatgaaagagcaacttgaaggacaaggaattccggtagttcacgataaaacgaatatgggtgatttattagcgagtaaaaaatggaaatggccgcaatcatataaagcgtctcatgaatatgtaaaagaagcattagcacaaaataataaaattgcgtttccaattgatatacaccgtgacgatcagcgtaagaaagtaacaacaaaagtaattaacggaaaatcgtatgcaagattatattttataattgggatggaaaatgaaggccgtgctgaaaatgaaaaaattgcaagagcgatcaatagttatttagatgaaaactactacggattaagtagagggatttttcccaagtataaaaaagatggaaatggcgtttataatcaagatttatcgaaaaatgcgatgttaattgaagttggtggtgttgataatacgttagatgaattatataacacaattgatgtgttaacagaagcgtttagtaaatattattggaatgatgcggaaaaagtgaatggatgagggacgggagaccgttccttttttattttggaatcttaaaatgtgatataatggaattttatgaatgttaaataaagggagagagaaacatgcaaatactactaatacgccacggagaatcagaagctgatattttacatgtgcatgaaggtcgagctgattttgagttaactgacaaagggagacaacaagtacaaagacttgtacagaaagtgaaaaaagattttgcgccagatttcatttgggcaagcacattaaaacgcgctcgtgaaacgggtgaaatattagcagaagcaattggttgtccaattcaattagaagaggaattaatggagtttaataatggagtgcaagcaggcgtatcatttgaagaagcaaagaaatatccagagccaaagtttcttcatgaccgttttgaaaacggagaatcatttattgagtttcgaatgagaatagaaggaatcttttctaaaattatgatagagaatacatatgatcgaattgcaattgttgcccatggaggcgtaattaatagtctattacgtgcatttttcaaaatgccaatttcaatggactactatttcaaaatgggagatacgggaataagtttaattgaaattgagggtgaacaaaaaacggtgcatttcattaatgatacgaatcatttggacgggatgtaaagacttatgtacaaagttgtatttttcgatgttgacggtacgttattaagtgagattgatagaagcatgcacgaaagtacaaaagaagcgatacgaaggttaatagataaaggaattcacgtagttgttacaactggaagaccgtatagtttatgctcacaatttaaggaactaggtataaatacgtttatttcagcaaatggtgcacatataaaatgtgggaaagaagttatacataaatcagtactttcaagcgaaatcgttcatgatatttcaaattttgctgaattacatggtcacagtgtttcttaatgtgattataacagggtttttaaaccctgtggcaacattttggtaccttttttactaaatcttcttctataaatgcaattacttctgcttgttttgaagggtataggtggctatacgtatttagggttgtagccacatctgaatgaccaagacgttgtgctactataagtggacttacacccttgttaattagatatgatgcatgggaatgcctaaattcatgtaacaagattcttttaacaccagcgttaagtacatagtttgtatactttctatcgagagtgcttgctgatatgctagtataaaattcgccaaacacaacgtaattaattttgataggtgattttactgtagcatgctcttttaaatttttcaataaatcgattacaagagatggtaacataataattctatttgaggattttgtttttggttttgtaatttttctgttaaactctgttttatttatatttattgttttttcttcaaaattgatatcttcccaagttaaagctagtagctccccttttctagcaccgctataataaagtgtcgagaaaaaagttttatataataaatcgtctacactatcaataaattgatgaaattcatcaaactcccaaaaattcattcgtttattcgattccttttcgaaatttccagcaatgcgtgcaggattgtttgttaatccatgaaatttaattgcgaagttgaatatggaagagagtacagtatgaattttttttaaatggtctgcggaatagttgttaataattttattttgataatgcataatgtgtttggccgtaatctggtcaattttgattttgttaaattcttgtattaaatgattgtatattatatttcttataacgtttattgatgtgtgctttcgtctttggcaataccaatcaaaataactatctgcaacttgagcaaatgttaagtttgaatttgtttctttttcaactaacattttagcttcagcttcacgagcttccttttttgttttaaacccacgacgtttcacttgtttttgagtgccatcaaactgacggactctgacgacgaagaaatatgttcctcgttctttatctttgtaaatcaccataagaatccctcctgtataaataaagatcgataattcaatttattgagtagattataacttgtttgttaccaaaagaaaagacgctcaaaataaattgagcgtcttactttgacttgaaccactttaattttaataacatataacttaaaaactccccactaataatagtggagaagattggtagggaaaccaatcaggatgatacaagtaaggataaaatcatagtaccataataatgtcttgacgcatattgagaaattcaagcatttacttcgtgttatattgtaatatattttcaaattggtggggtgcaattattaaaaaatggctggtttctacatggattttagcagaatatattgaaaaatgaaccaatgctcattacgaatataaaacatatgaaactgcattcaaatattttcaacatttttctcagaagttatattgagaaataaattttagtgtggaatagaatatgagcccatgctaaaattagctctgtgtacagtaaataggtttctgtagaattaatagacagaataatcgtaaaaaacaaaataaataaaagcataaaaactcgcagagcgtgtgtaagaggtacaactaacaaagcctttcacactgttcatcctagctaacttaggacaaacatttgcatcatacgagttcttcgtcagtgtaacacacacctagtaattttaaaatgtgttctgagttgagaaaattaaggaggctttttatgttaccggatggagggaagaatactttgaagccgctacaccttgaaatttgtgaattaattgacaatagccctgagctaacatatgggagtgttgctgaggctattggagtaagtcctcaatatatgtctaagttcaaaaaaagtgggacaattagtttttgtagtctcttgaaattgtcgcaagtattaacgttgccggatgaaaactacaaaactataatgcgtgatttctgcttgaaagttgatacaacagaactaatcaaacaaagctttgagtacgcttcgattactagggatattgaattgttaaaacgtttgataggaaaatatcgaaaagataaaggaagtattcaggagtttgtggatgtttacgaaatactgtatcaatacatgctaaggcagattgatggggaatcactgattgaagaaataaataacttacgacaacctacagattgttgtttgcgaatattaattagcattatgaaatgctatggttactatttttctaaagagtttccaatgatgattgggattggcaaagaaatagagcagagactcaaacagttaagtggtggacgtaaggattttctccagcattgctatttttataaggtatacgaagtcttagcacctgtacatctacgatcaaataatagagatatggcaagaaaatatgcttctattattaaaaatgcaaacgttggtatcaaagctatttcagatgcatcatatataattggcatgtcttatttacttgaaaataaacagaaatgtttatcaatggtaaaagaatcatataatttatctaaacggattggtgatcagggctacgagaatgaggcgttttataatatgaaaatggtagaaatgtattatgctgcggaaacagacgggacggctagtgtattggctgacgtcgacaaatatgctcaagttttttatcaaaaagaaaaggaagactttattgtgttatttaaggcaatgcaagatatgtctaatgaaagcttacataaatgtcttcagcaattctttactcaaggcaattactttttttccagtctaagcgcaagagaattatataagagaggggaagattctgctataattaagtggatgatggattataaacaagaagtgggagggaatgaagttgaagaagagaatattgatattttcagtgatgttaactttaatgatgatgccatttgtccctaataagggattagaaggaaaggttttggataaatacactaattatatggatgttagaccaggcggttgaattatatggacccacttagtgaagttgaaaaagtgggccttttttatttgtcaatatattttgctaaaaaaaagcattttgttttttggctagtcttgagacatctataaaaattagtaataaaattataaaaaaggtgctaatttacaatgggtgatgagattattacttataggagagattagacaaatgaacaagataaatgttaaaaaaattaaacaggaaaacactgaagataaaattaaaaagatgttaatgttagaacaaatttttagtgaggatgaagaatacatacttgcagttagtaaaattaaagccatgattaataataattaatcatggcttttttcgtgtattttaattaaatcatcaattaattttataatgttttgttttgtttcttgcggcatattgtctagacgtttcatgagatgagcagtttccgaatttattttttctgtttcaagtgaaaggtcggtttgcatacccaataaatagtcgatagagacgcctaagacagtagctattttataagtgttctctcgtgaagggctctttctattggtttcgtataaggaaatcgcagacctatttacatttaaagcttccgctagttctttttgtgatatgttctttttcgtacgaatagactttatacgctctcctaacgttaccattactaacaccctccggttaactgaattaaacttttctattgattatgataactaaaaaagtataacaaagcaatgttttttaaagaacaagatattaaaaaaaagataaaaagggtttacaaagaaaatatatttagtgtatgatgttaacacaggtaacagatggagggcgaaaatgaaaaaatttaatgggaagaaactgtctttattaagaaaaaataaggggttttcacagagggaattggctcaattattaaactgtagtcattctttagttaatttaatggaaaacggaaaaatccagccaacaacctcaaaattattagggatgtcggaagtttttaaaattccaatggatgatttattcatcgattttttttaactgacatgttaacagtgttaactttatgttggattatgattgaaaactaatttaattagaaaaggaatgatatccatgcacaaaaacttatttattgctcgaaaagagcaacgtatgacgcaagaaacaattgcaaatttaatccatatttcaccgagaacatattttgctaaggaacacggtaaaagtgatttcaccctaaaagaagctcagaaactagcaaaatacttcaaaacaacagtggacgagctgtttgaaaaataaacagaaaaggtgggaggagcatttatgaaaaatggtaaaagaccaaccaagagagaaaagatacatatcaattcatataatttaaatcctgataattggctaatctttaagaagatagatggcgaattacatttagtgcatcgtcatacaaactcaatacgagtcattccaagtgcatagggtggtggactggacaagcattattaaaatttaggagggctttacatggatggattaacagtagcaaacgaactggtatttgaaagtaatggtgaggtagtaacggatagtttgacaattgctgagattttcggtaaacgacacgataatgttatatcagatattaaacttcaaatggattatgcaggagcagaattctcactcctaaattttgaggagtcaacttacacaaatgaacgtggtcgaatatatcccaagtacaatttaacagaagaagcatttacattagttgtttttgggtacaacacgaaagaagcagtgcaaacaaaaattcgatttatacaagaatttaaacgtatgaaggaatacatcaaaaaacagcaacatgtacctacagatcccatgagtattttaaagcttacttttgaagcgctagaagggcaaaagcaagaactccagcacatcaaatcagatgtcaaagacttacgagaaaatgcgccgttatttgctgtagaatgcgatgaaatatcaaatgcagtcaagcgtcatggcgttgcgctattaggtggtaaacagtctaatgcgtaccaacatgcggggattagaggtaaggtctaccgtgatatctataatcagttatatcgtgaatttggagtaacaagccataaagcaattaaacgtggtcatttggcactcgcaacaaagattgttggagcgtatacgttacctattgtgctgagtgagaaaattaatatagtaaactctcaaattaagttctctgagatgtgaaaaagttggaaggaggaaataactatgatggaagaaagtgttttttcagtatgtatcactgggtttctgatctgtgggcttttgcttgttgtttatgcactcgataaaccaattaaagaatttacaaaagatgtggaatgaatttgagaggagaaagcgctatgacgttatcagttttaaagaaagatgtacagaaaaaacaaatactagatgaattcttgcagcattgtgaaaagaaacaaatagaggcgattcaaaagaatgatccattgttactttgcatttggattaaagaagcacgattggctcgacgggagcttatagcgctataccgtgagaaagaaaaatatgataaccaacttgaacaggatcgtaaaagcattttagggattgtggaacatttaagaagtagaggcatcaatgcttcagccgtggagagggtacattgtatagcaaactattatatttaaaaacaagaagggatggtaaaaaaatgacagcagaagaattatttgaagaaaagaaatatttagtgattgcagcgatcaagcaacaatttggaagtatcgcaagagctgggcagattgcagaaataaacaatatggatttggatgatttaatacaagttggccatctgtatttatgggagcattgtatgaattatgatccagagagagtagatacattcaatgcatacgtgatgaaaggcatgaaatgggcaatgagtgatgagcttcacttgaaagggacgccttttaagataagcagacgagttggtcatgaggaacggaataaaatgaatattcattcgattgatttgcatcgagatgaggaaacagtaaaagaattttatgcagtatctcctattgatgtggaaaaagaagcgatattatccattgaatttgaagaagtgacgagtgtacttgaagaacaagaaaagtcaattattctgcacgtcggtgaagggtataccacagaagaaatagctagaaaattagagatgaaaaaatctactgttcaaacaagaaagacacgggcatttttaaagatgaatccagcttataagccaatcaaacaaaaatcctttttcttggggaaaagaatgataaagagaaaccaccagttggggctggtgatctaatagaaacacatgtgatgtcatcataacacatgttgcgtacgagatgcaaaaaaagacctgttatagcaggtcaaaagtcagggtatttcgtgaaagaatataacttattcatcattctaacaggaaaaagtgaaaaataaaagattgaaaataaaaaatattaaatctttttgttgagaaatatcaaataccctagtagtaaagatatattgaaaaaatgttagatagagaagggggactggaatgaataccaatgtaataaaagtcgcaagaataaacctgcaaggtaacactttagaccagggctggtttaagtaccttactttagaaaatggcaagccctatatggttgcgattacaatacttagcgaaattttttattggtataaaccaactgaaataaaggatgaaagaacaaatgaaatccaatataaacaaaaatttaaagcagacaaacttcaaaaaagttatcaacaattggctgattcatttggttttaccaaaagacaagtacaagaagcatgcaaatacttagtaaaaagagaattaattgcaattgaatttcgtacgatcatagttaacggaactaggcataacaacgttatgtatgtggaaccaattgtgaagaacatcgaaaaagtttctatcttatatcaagaccctatcacgctagaaagtgacaccctcccacattctaatgagagaggctcccacgctaaaacggaggaggctcctacattgaaacgtgggacaaatacaaagattactacgtgtggagtgggggaaaaggtagagataacttcaaatccttacctatcactaacatgaatctgttcaaaaatctgattttgcagctgtatcggctgctcttcaagaactacttgaggtgcaatatcgacattatcaaaatcagctgcaaatgcaagagagaaaaaataatgaccatttaacctttatgaatcagtggattcatcaaatgaaaacacctttatctgtaatagaattaattacacaggatgaagtagattcacgttttgaaagtataaatgaggaaactgatcgattaaaaaagggattagaaatggctctgtatgtcgcacgtttagaagcatttacacaagatttttatgtagaaagagtacaactacataaaatagtgaatgattcggtacatgagcataaacggttctttatccggaattttgtatatccagagcttgaaattgataaggacattactgtagaaagtgatgcgaaatggttacaatttttaattgggcaaatactatcgaatgcgattaaatattcatcaggtagtagagaaaagattaaagtgaaagcttgtaaggaaggtaataccgttatacttgaaattgctgataatggcgtaggtataccgaagcaagatttaccaagagtcttcaaacctttctttacaggagaaaacggtagagattttaaagaatcaacaggaatggggctatatctcgtatatgaaattacgaagcaattaggacatagtgtagcaatccattcagaagttgataaaggtacggtagtacgagtaatgttttttaatgtgtaaaaagtgatcaaggctaaagaacgttggagataagttttttagccttgttttgtattttttaaaaagttttcatatgaataaatgatacaaattagtaaaaattaaagatatgagcacatgaaattgtaaaaataaacttgaagaaaaataattgcttttgaagtacaaataataatatttacgcatacagtattatcatggtacaatatggttattaatgacagaaaggaatgatgggtggacgatgattaactaatcttatttttaaatgttgaaattcaataaatttcaatttctaaaaaataggattagtctgcccaatttccatagaacggtattgctatttatgttatgtaatagcttatttgggtgtaaatattttaacgactaatcctgccaaatttatttgggaggatttttttattctcccttaatgaaagggatcggtattatgaaagaactattaacattaaatgatgtttatgttgaaataaaagaaaatatgttgttagagaaaatgaatgtgacagtaaaacaaggggatgttatcggattaattggtaaaaacggtgctggtaaatcaacgttacttcaattaataaatggaaagattgagccttcaaaagggattgttgaatggcagcaaatgaatatgacaaccgcatatgttgagcaagaaatagaatcttttattagtaatgatgtaattgcaaaagaagcagaacttcttgcgaaatggggcgtgccaacgaacgattttcatactttaagtggtggtgaaaagctgaaaattcgattagcaaaaggatttgctgaaaatcctaatgtcttaatattagacgaaccgacaaatcatttagatgagatcagtacgggatttctcattaaacaaataaaaaacatgaaaggtacagttatcgttgtatcgcatgatcgatattttttagatgttgtcgcaacaaaaatatggtcaattgaggacaaaaaattaattgagcatagtggtaattatacgagctacatgaaagcacgtgagcaaaaaagaaagtcgcagcagcgtgaatatgaaaaacaacaaaaaaagatagaacaagtagaaacacatataaaagaattgagttcatggtcacaaaaggcacacgcgcagtctacaaaacaagaaggtgtgaaagaattctatcgtgtaaaagcgaagcgaatggatgcacaagtgaagtcaaaacgaaaacgacttgaaaaagagctggagaaaacgaaagtagaacgtgtgaaagaagagtattcagttgagttttctattcaagcgaacaaaaaagtaggaaaacgctttttagaagtaaagcaattaaaaaaagactttcatgggaaagtattatttgaaaacgttaattttacaattcagcacggtgagaaagttgcgattgttggaccaaacggtagtgggaaaacaacattactgaagatgattatgggaacggaaactgctgaaggagaaatatggatttcaccttcagcaaacatcggctatttaacacaagaagtttttgatttaccgcttgataaaacaccagaaaatttattttttaaagagacgtttgaagaaagaggaaaagtccaaaatttaatgaaacatttaggattccaagcgtctcaatggaaagagccgattgagcatatgagtatgggagaaagagtaaagtgtaagctaatggcttatattttagatgaaaaagatgtactcattttagacgaaccgacgaatcacttggatctaccttcacgtgaacaacttgaaaatacattagctgagtataacggaacattagtaattgtatctcacgatcgatattttctggagaaaacaactaacacaaaactcgtgttttcaaacaatacgatacaaaagcagctagaagaacctactaaaacaagagatgatattgaagagctacgtttaacgttagaaacagagagacaagaagtattaggaaaattaagctttttaacttctaaagacaaagaatataaagcactggatgaacggtttatggaacttacgaagcagattaaggagctataacgtaaataagggggattaacatgggagaagagagattcactaagttatttaaaatagattgtggagatatatacttgcaagagtttacggtcaaagatgcagagagtatttataaaatagcaaatcaaccggaaatagcaaaatttttaccagactggaaatcaacgaaagaacaaagggtggattggattgcagattatgaaataccagcaaacaaagcatttcttgatgcagtgaaaactacgaataacatagataatcatatgttaaagctaggaatatttaagaaagctacaaatgaactcattggatggtgctgcacaggtatgaaagaagaactcccttcaccaaacagagagataatgtatgctatctcaaatgaatatcaaaatcatggctatgctacaaaagcgactaaaggtttaattgactatttgtttaaagaaacaaatttaaatgtccttaacgcaattgctttaattaacaatgtagcatcaaataaagttattgaaaaatgcgggtttatttataagagccaacagaggatagaaaatcaaatatataatcattatatattgagaaaatctgagtggataaaaatataacgtttggtagtaaaagaccgatagcaatcggtcttttctcatttatataataaagatttattatacattatatttcctactactatacaattattataagatagttatgcgttaattttagtttgaaataattatgttgtcattttttttagaaatcttacaagcgtgtaaggtaaatgaaagatgaatcaatatgagctgtaagacaattcatttacactttatagtgagcagtggaaatgaagggagaatatacatggaaattttacatgcaaaaagtattagtaaagtatataaagggaaagtaccttataaagcattagtagatattgatttatcaattcaagaaggtgaatttgtaggaattatgggtccatcaggtagcggaaaaacaacgttattgaatatggtatctactattgattctccatcatcgggagaaatatttattaatggcacaaatccttttcaattatcatcagaagaattagcgttattccgcagaaaacaattaggatttgtttttcaatcatttaatcttcttagcacacttactgtaaaagaaaacatcgtattgccgatgactttagatggtgtttccgtgcaagaaatgaacaagcgattggaagagattgcagagaagttaaatattacagatatattgaataaaagaacgtttgaaatatcagggggacaagctcaaagaacagcaatcgctcgtgcaattgttcataagccgcaattattacttgcagatgaaccaacagggaacttggactctaaatcttcaaatgatgtaatggagatgctggatactctaaataaagaagaaaaagcaacgatgatgttagttacacatgatccgtatgcagcgagcttttgcagccgagtaatctttattaaagatggtcaactatataacgaaatttattgtggtgaaagtaggcaaactttttatcaaaagattatggatgtcctttctttgttaggagggaaaaggcatgacttttcgtcagttcgcatttaataatatttttcgcaataagcgtacatatgctgcccattttttaagtagtgcattttctattatgattttctttacgtatgctcttttattatttcatcctgatttacaaggtgagttgaaatcgacaagtgcaacaataagtgcatttggtacattgggattttcagtttcgcaaggattgatttttgtattttcatttttcttcattttatattcagttagttcgtttttaaaaacgcgtaagaaagaatttggcattttaatgatgcaaggtatgtcaatgagacagcttaagaaattattattaattgaaaatatgttgattggacttggttcaatttgtatagggattttcattggactcatattttctaaactagtcttattgataagtgcaagtgtattaatgattaataatggtttacctttttatataccagtgcgggctgtattattaactgttatcacatttcttttcttgtttttaattgtttcattatttacatttaaaatgataaaagtaacggaacttgtggaacttattcgagcagaggaaaagccaaaacctgaaccgaaatcttcagttttattatcgctactttctttaattagtatagggtatggatatttttcagtatttcgcttcataccaagtaccaattttattacgcttggaataggtgtgctcctagtaattataggaacgtactttttatatacacagtgtagcgtgtatatattgcgccttgctaaaaggagagaatctttctttttaaagagaacaaatatattaacattttctgaattaatttaccgtatgaaagataatgcaacgatgttttttatagtatctattgtttcagcagttgcatttacagcaattggtacaacagccgcaattggaaatagggatttagtaaggatgacaaatccctatacatttttgtatggaagtcttgaaaatgacaaagtattgaataaaaatctttctattataaaaaagcacctttctgatgctaatattccgtatcgaatggcttcatcttcatatatatacacagaaaatggcgtaaatgtaatgaagttaagtgaatacaacgatcttgctaaagcactaggctatcaacaagaaaaaattgaaaaagaagatgaaattttattaattcctggagtcgtatcacaaaaacaagaatttaaaaatggcgagtataaaaagaatatagaagtcattcaaggtgactggacaaagacatttcatgtgaaaaaagctgtagaaaatttagttttaccacacgattctagaactatttatatcgctgttcaagatcaggtatatgatggaatgcctcttactagtgacccagttaataaagaaattccatatcgtacttacggatttgttgtagatgattggataaaaacgaaagagatttccaatcaattaaagagtatattcgataaagatcttagggacagagatttctactttgaagctttaacattaaacttgttggaagcaaagcaaaagaatggtttattacttatggtaagtattttagtcggaatcgtcttctttacattcgctgctagttttatttatttccgattatatacagatttggatcgcgatcagcagcaatataaaatgatttcgaaaatgggattaagtaaaggtgagttaaaaaaagttgtaacgagacagttattattaatgttctttttaccaattgtcgttgcagtgattcatactgtagtcgcttatatagcattacagcaattagtcgatttttctatcataaatagctctatcgttattttaatttcatttatatgtatacaagttttatatttctttataacccgttggcgttatctgcaaaagctttataaggttatggagcaatagaatttattagcttgtaagactacaataaagtatgtagaaaaatgaactgtatgatgaaaggaaacgagatgaaaagaactttaactatttttatgttaacgatactattattaataagttttagtgcatgttctaaaaaggaaaatccatttcctgcaaacggtgtattaattattggagatgaaaataatatttcaccaattattaatcgttatcaggaaattacggaagaaaatgaagtgttttctgtgaaaaaaggggaagttggaaatggaaatgtcttaattttaaatgaatctacagcacaagcattgattaaagaaaaactttttcgaaaacaagataatggctccaattatattatagatacgttaccgaaattccccaaagaaggggcgctattatttacaagtgaagacaataagactatgaaaagtattaaaataggagaggaagagattcctgttacatacgatagtgatgcttggataggtaacaatcgtaaatattcaacggaatggtatatgattgtagcaaaaaatagtgtttataaagaaataaaggcaaatgaaatgaaaatgcatcttcttcatttgaaaaaatcactaggtgacgaaaaacctaaaatgtcgacagataatacattggttaatgaaaatgtcaaagtaaaaaagttaattaaaggtttggaaggagaagtatcttttcactttgtaacgattggcgaaaaaccttaaaaaagagttcgaagttgataaaaatttcatcagcttcgaactctttttagtttatagacaaatcaattattatgctttacattacttcatttaatcgagtctcactcgtttcttcaatcgcatttgaattttgaactgaattattttgtgcttctttttctttacgagccttttgtagcatttcaagtataatccataaaggaacacctttatcctttaacatcttccataaatctaattcattaaatttatgctcaggctgtttcatttctttttcagatgaacgaatatcaaacttgataggatcatttattttcttactttcaagtttagtagaagagatagtattatgctcaagagtagatgaagttattttagtaggttgagataatgtatgaatatttgatccgatttgcatgctttttcctccttttcaagcaatgagattagttttcttatggtttttaaatctttttaacatgaggcaactatatctaattataaattcaaataaacagatttacaagttgtattgtaaaaagtaaatatttacttgaattaatatttatcaacatttgtatatgttttctatatatacaacgtatataaaatactttacattatgtttaagttgttaaagtattctgttaatttttttaaaaaagaaaaatgtaaacgttttattagggggagaaagtatggggaagttatttttaaaaatatgttttttcgcattagtgaccgtatgttcattcgcagcgaaaatatcatacgctgaagagaggcaacaaaataattatccaatcatattggtgaatggatttgctggatggggtagagaagaaatgcttggcgtaaaatattggggtggtgttcatgatatacaggaagatttgaaacgcaatggttatacggtacataccgcagctgttggacctgtttctagtaactgggatcgtgcatgtgaattgtatgcacaaattagcggtgggacagtagactatggtgccgtacatgctgagaaacatggacataatcgttttggcagaacttatagtggttttgcgccgaattggagtgaaacaaataaagttcatttagttggacatagcatgggtggacaaacgattagaacattagtacagctattaaaagaaggtagttttgaagaaaagaattatgtgaaaaatcacccagacatcaaaatatcaccactatttgaaggcggaaaatcatatgttcatagtgttacaacattagcaacccctcacaacggtacaacacttgcggatggtagtcttctactgccgttcgttaaagatttactcattacagctgcaagctttggaggaaacaataatttatcattatatgattttaaattggatcaatggggtataaagaaaaatgctggagagtcctttttccaatatagtaatcgtattctaaatagttcactttggaaaaatacaaaagatataagtcaatgggatttaagtacagatggtgcaaaggagttaaataattgggtaaagacgcaaccagatgtgtattatttatcctatagtggacatgcatcacaagcagcacctataacaggtttacatttaccgcatattacgatgaataaattgttgatggggaatgcatttttcttaggttcttatgcgagatatgaagaaaaccgtccgttagttgatacttcttggtggcaaaatgatggtgtagtaaatacgaattctatgattgcaccatcttctaatgttgctgtaaataataatgggtcattacagattggaaaatggaatcatatcgaaacgaaagcgaattgggatcatctcgatatggtaggattaagtgtttcagactcattaggtttttctagcattcaagagttttatagaacaattgctgaaaagctatcacgtttaccgaaataggtaataataaagcgctctcgatggaattcgagagcgctttatattatattgaaagagggatttggtagaaaaatatggggggatattatgaaaattcaagttgtattatcaggatacggaacagtaggcagagagtttataaaattattaaatgaaaaatattcatatatatatgaaacatatgggattcaattagttgtaagtggcgtattagggagaaatattgcaatacataatgaagacggcttatcacttcatcatttattgatgtatggtggcggtaccgctgcaattgaaaaatatttagagtatcatccgaaggaacgtgcaacaactagcataagtggtactgtattggtagaatcaacagttacaaatcttaaagatggaaatccagggaaacaatatatgaaacaagcgattgagaaacagatggatatagtagcaatttctaaaggggcgctcgttacaaactggagagaaataaatgaagcagcaagaggcgcaaatgtacgaattcgatatagcggtgcaacagccgctgcattaccgaccctagatatcggacaatttagtttagccggttgcagtattgaaaaaatagaaggaatattaaatggaacaactaattatattcttacgaaaatgtatgaggaagatatgacatttgaagaagcattgaaagaagcacaagataaaggaattgctgagacaaaccctatattagatataagtggttcagatagtgcgtgtaaattgttacttttgacaaacagcttaatggaaacagagaaaacacttactgatatacatataaaaggaatcgagcacgttacaaaacagcaaattagaaatgctaaggaacaacataaaattattaaattaatagcatcaacatataaggatgagggtggcaatgtgaatttaaatgttgaaccgtgcgaaatagaaaaagatcatccgttagcaaaagtaaatgggaccgaaaaaggaattacgttctttacagatacgatgggacaagttactacaattggtggggcttctaatccacgaggcgctgcagctgcagctttaaaagatgtgattaacttatatcgaaaagatttgtaagaccgtaccgccctttataaaaaatacatatgtcgtggaccttttgagaatgaaataaatatgaaaaaatgattgcagggggtaaggaattgtttaaggattttaaagttgttaaagatcgtcccgtttatattcaattgaaagattatttgaagaagatgattatgaaagggcatttgctcggggatcaaaaaatcccatcaacaagggaactaagtgaattactaagtgtgagtagaaacactgtactcgctgcttatgcagatttagaacaagaaggactcatttatgcagttaaaggaaaagggaactttgttgcgaaggtggatatatctaacacttcgtctgttgaaatagattggaaaaataaacttaatacagtgaccgcattagcggatgaattagatttaatgaaacatggtgttcgttgggaaaagggaatgattgtctttaatagtatagccccggatgagaagctatttgatgttgaaaatttcaaaagagcttttcttactcgtatgtccattgaaggagacatcgtattgaactacggatatgcaaagggatatagaccgttaatgaattatttacttcattacatggaaatgaaaggtgtagacatttcgaataaagatattctaattacaaatggatttacagaaggattggatattgtactctcttctttatcaaaaaaatctggtcgtgtcatttgtgagaatccaactcaccacgctgcactaaagctgttccgtttacatggacttgaagttcatgggattgatatgaatgaggatggtattgatacgaataaagttgaaaaaagcttgcgtgaaaaagattttgattttgcttatttaattccttcttatcataatccaaccggtattgttacgagttcagagaaaagaacggaattgatgaggttattctcaaaatacaacgttcctattatagaggacggatttaatgaagaattacgttattcaggttcacatttagctccattattaacttttgcgggagctggcaataatgtcatttatattagtagcttttcaaaggtacttttccctggtttacgtgtaggctggattattgcagataaagagctgattcattatttagaaagcgtaaaaagagcaagaacgattcacacatctacgctagatcaagctgttctgtttcaatatttacatgagggatattttgagaaatatttaaaaaaggcaagatctgtttataagaaaaaatatgagttagctgtcggggcatgtaaccagtacattcatttcaaaagaatgactggagatggtggacttcatttatttatagaactagaagagcatatgaatgcccgcacacttttacaaaagtgttatgagaaaggcgttacgttttcacctggagatgttttttactctgatggagaaggagcgaacactttccgattagggttttcgcgcttgaaagaagaagaaatagttcggggaattaaaataattggtgatacattaaaaaatgaaatttggagttgagaaaatgaaaatcggtgttattatgggcggggtatcgtctgaaaaacaagtttcaattatgacggggaatgaaatgattgctcatttagataaaaataagtatgaaatagttccaattacattaaatgaaaaagtggatttaattgaaaaagcgaaagacattgactttgcgttgctcgcgttacacggaaaatacggagaagatgggacagttcaaggaacactggagagtttagggattccttatagcggaagtaatatgttatctagcagtatatgtatggataaaaatatttcgaaaaagattttacgttatgaaggtgtagaaacaccagattggattgaacttacaaaaatggaggatctaaatcttgatgagttagataagttaggatttccattagtagtaaaaccaaactctggcggatcgagtgtcggagtgaaaatcgtttataataaaaatgaattgatctcaatgctagaaactgtattcgaatgggattctgaagtagtaattgagaagtatataaaaggtgatgaaattacatgttcaattctggatggaaaacagttacctatagtttcaattcgacatgcagccgagttctttgactacaatgcaaaatatgatgatactagtacagttgaggaagtcatcgaacttccagtagaaattaatgaacgtgtaaataaagcgtcacttgcttgttataaagcattaaaatgtagtgtttatgcaagagttgatatgatggtgaaggacggaattccatatgtaatggaaattaatacattaccagggatgacacaatcaagtttattgccaaaaagtgcagaagcggcgggaattagttatagcgaactattagatatgattattgaaacatcattaaaagttagaaaagaagaagggttttaagggaattatataactaattttttgacagtttcacgaagtatgctatgatgaatacattataaaaacaaaatatttatccactaggggggccttttataggctgagatcaaatgtgattttgagactcttagtacctgatctggttaatgccagcgtagggaagtgggaaagacgttgctatttaatgagtaaataaatactgtcgatttcactttctttacgcctgtaaagaaagtttttttattttacagctttaataattgtggataaatacttatattttatacattattggagggatttaaatgactttttcacaatcgttacgtaaagaagtagattcaatttgggaagcgagttttaaccatccttttgtaaaaaaacttggtgaaggaacgttagatttagctagttttcgttattatgtgcttcaagattcatattatttgagccattttgctagagtacaaactttaggagctgcgaaagctcttgaattagagacgacagctcgtatggcacatcatgctcaaaatacatatgaggcagagttatctttacatgagaattttgcgaagaaattagggataacaaaagaagaaaaagataattttattcctgcgccaactgcatatgcgtatacttcacatatgtatcgtgctgggtatgaagggcatttaggagatatcattgcagcaattttaccttgctattggttgtattatgaaattggcgaacgcttaaaagagtgccagccggaagagccaatttataacgaatggatttctgcttatggatctgattggttccgtacgctagttgaagaacaaattacacgtttagatactatcgctgaaaaagtaacagaggcagatcgcaaacgtatgaaacagcattttattattagcagtcaatatgaatattcattttgggaaatggcttatacattagaaaagtggccagtggatacagacgtaaaagacgtaattggataaagaatagaagtaatgttatagctaggtatggatcatacctagctatatattttttcttgtcaaatttgcgtaaagtcattagtgctacggaaatggcgaaatagaatatcgataatttagctcatttacttgtctacgcattaactggataaacttctgtcacatttattttacaatcaaagaacgtaaatgttggtggtatgaagttaaataagaaaagaaacccgagctgttagctgtaacggagttgttttttctttgcaggaatttctaaattatcatggagtgttgttaatacgatatgcaaatatgcatatcgtatttttttgagttctttatgtgttaaaattagatatagagatatggaaatataaagaagcaaaagcaggaataaccaatgaattttgagaggtgttatatgtttacaaataagaaattaattcgatttggtttatcgttgtttgtatttttagggataattaattttacaatcagctatttccaaacatatcttgaaacagcagcagatattaaatgggtaattccagaaatttggaaaactattttgctagatgttcctcaagggatacttgttcttttaggcgcaattgctttatatgatttcacaaaagaggcatcaaaaaaagacgcatcaatctaaatgtgtcttttttcaattagcaatttcatatagagatttgctggagaaatagaatgaaaagccctaattagggcttttttttgttggaatttcttaaccgtcatagaaaccggtcacttggaggtgttatagcgaaagccatttacagtacagaaaaatctaagcagcagacggaaatatataggatatggcatcataattgttgagaaattaattgaacttagtaagtatgaagatatgacgctagaattcatattttttaatttttatttatcccgctatttgccgggcagtaagccccccacctcaaaattcagcggaagcaaagaagttaggtaggggatgaacaaaaccccactgattaaagtttcactttataaaaatgagcccatagtaaaaataggtatatgaacaaggtgcatcatctagtgataagtcatactttgttggtgtacgtattgaacttagtttatagcgctatttctacttagatgtaacgaacaggaatatagggaagtatcgatgaggttgtattttataaacggaggttatgaaaatgaatcagtttcaacaagaactacaagcgttaagccttaatgattaccggtctggaaatattgtctattgggaccagcaaaaccaatatccatattactatattgaagatgctgctcgtcgctgtggcggttgtggtcgttgtggcggttgtggtggaggtcgttgtggcggcttccgttgtggtggcttccgttgtattggttgcttcggttgttttggttgcggaggctgtggcggttgtggcggctgtggtggttgctctaactgttttgatggttttactgatactaccggtactattgtaacgtatgaatattgataacatctatcttgctagttgcgggcagtaacatccccaaaaaaattcagcgagagcaaagagaagttaggtggcggactgcccataaaagcccgattggtgagagctgattaaagtttcactttatcaattaaaaaacattagttatatgtacgtgccgacaaagaatatagccattattaatggatatattcaatcattcaagtgaaagagtaacaataagatatatagatgtaatcaagatgtgatggataaagcaatgactagatttaaaatctaatcattgtttttttcttatggttttatcattaaatatctgtctagtttgggcattgattccttctagctaatgattttattacaaccgtgtaaggttaatgtaatgttaatcgatagtaaaataagttgcttaagtgtattttaaataagattaaaaagtactgtttatctacaaaataatagggtaaatactatgtaattaggaagtgtatgaatatggttgaactaaaatctattttccattcgtataaactaaagagaaaaatagctaaagatttatacggaaaaagagatgaattatcactgttattaaatgaatttaataatatgaaatgtacagtaacatctgaaaagaagaaaaataatatattatctcgtttgcaactaatttatcaaaatatgaaatcggataagcagtaccctctagcagttgcttttgatagtaaattattggagcgattagaaaaagaatctgtacatactattgaggatggtgtaacatgtctacatttaatgttagatatgaattatgagaagataaaacaatatggttcgggtacaagtaggtcattcgttccattatcgcagtcttctatttgtcttgctgattgtatttgtttaacaggatttgtagtaggtttactaggaacaatttcatttggaggattactgttatctatatgttcaattacataacgcttaatatttgtaaagagagcgccgatttaaggtgttcttttttagttttttgtaaattttttgtaaatgataagtacaatacattatataaattgtataatttaaatgtattaaaatataaatataatgaggtgctgtatatgataattacttttaattgttaaaagagtcgatttgataatgttttattcagataaatagtttttacttttcttttaaatacttgatttaaatggattagattaagtaactattgttctagctttttgataatcaagacaactgaagaaaggaaggaatcattttatgaaaaaattaaggctgctaacatttgaaaatatagtagaaccccttttaaatgaaaaggtatcatttatatactttcctattgaatggctggacatcgtagagatacattataagacatttttattaacgagtaagttgaaacgtttgaatgaaagattgtatgatatgttttcagatatattgtttattcagcataatccgtacgtattaaatgaaaatacaccatggattgtatcaaaagaacctattaaacaagagcagctcgattatatttttcaaagttggtatgagattattcatgattggaagccaaatagattagtagaaccaccaaaatatgaatggcaatccgatttgatttctaatttgccagtactacatgataatgaaacgtattctaagtggatacccgctttaatctcacatattttttgtgagcgtcctatatatttagaaaatacaaatgaagaagaattctatttttctcctctgagatcacaaaatatttgtgaggcgatgtcagagccgataaaagatgaaaaaacacaagattttttctcctatgtatatcgatttcaatgcataacccgcggtggtgagaacgctccattattaaatatttcaatagggattcggagattttatcaagaatataatcatccagatattcctttacttttaagacggaaacgaggcatgatattgatttctacctcagagtttgcgtcaaataataaaaaaatacggtttgtaaaactaaaaatacaacaagctacaaccggtatgaaatggattaaaatatttagaaatttaaaagatgattttcaaatagggggagaggtggatttagaccatattctccaatatccgaaagattatattgtaggggaaaataaaagggtgttatttccatacaatgagagaatttataaagttcaaggtactaaaatagaaccgggtataaaagtaaaggaaagagagtatttatttaaagaatttcagcgtaaattctcttatttcacaatacttccagaatgtaaaaaggtagcaacaaataacaaaaatgaattatttcctttatttgcaccaaaaggattagagacattaacattagaggtttggtctgaaaatatagtgctggaaatagaacaagcattacttgatagtgaaattattttgactaaagttggtgaaaatacttacgtattgaatacagattttccagtgttattaaaggttgtgagatacaatattgaaaaggtgttacaaaatccatataaaatgcaatattgccaaaaatataaaacaaatcttgtagatgatgttacgaaagctgtctatgctaccgcgggcgagcgcagtgatgcgacattagcattaatcgcattgaaaaattgtgatggacgagaaaaaattgatccaaaacaaatcattagagagggatttgcacgagcaaaccgtatttcaacatttattaatttatttataggccaaagtgtatcgcgtaaaacaattgtaaatagtgtttttagtttattagagcaaaaaggatttttgaagcgtagttggaataagataaatttaccttgtatatatgttaatttatcaattgaacgaatatcgaaatttgatttcttacctattctttcaaaaataaaaggaaaagaaattttatataaattatatgggaatacagaatggcaaacgattgattacgtattattaaatataaataaacataatgcatttttaccacaaccatcaaagagaaatgatatgggagctctttttaaacaatatgtttccgaaacattaatggaaattgtacaatatgcaaaagaacaaaatgaacaagtttacttcattgtagatgcaaatttgagaaggtattggataaaaaagttacaaaataaagaaattaatacagatattttacctgatattgttccagaggtgttaaaggttccaaatttaaatattattagaataaatacaggttttgatgtaccaagttacggtgtaatagaatgtgatgatgctctagatagcattggcttatatgcagatcaaaaagggatgtattatagcactggtgaatattcacttaattgtagtgggatttttcagcgatatatacttgaaattctaccattaggtgtaaaacctgtagaaagggattatatcgctaaaatgatacattacatgtgctgtaattctagtatgctttcgaaaaagaatgtacacatgacatattccatgcatatggaaaaggtaataaagagttatattactgacatagatgcaagagagtttaaagaatttgatgatgaattggatgtagatgtagtaaaagtagaaaagaaagattcaattattctactttaaatactagtaaacaaatcctgctcgttatatcgatcaggatttgtcattttttcatgtaaataaggatatcctttgtcaagtatcttttcgtttacatatttactttatgtgcagacaggattaatatgttttttagaaatacaaaaactatttcatatggaaaaacgatttttattaattgaaaaaatttgaaaggaatggggaattgtgaagaaattagatgtgctcttaatgctactgagcggcctctttccaattgcaggacttacaaagcaaatccctctagaacaatctatatatattggagggcttttattttttactagtttcggtagttattttgctaaaaagatgtattcacgtatatgcagttggatagcgtatgcgccatttataacattactgttagttatttggcatcaagatatttcaacaagctcaatcatagcaaatgcgaaaattgctgcatgtgtcgcgttaattccatgtttattccgttttcgtacatatggacttactttgggcttattctcattatgggccgctttactatgggatataaaagaagtacagtcgttagtcatacttgaacgcataacgagtttaatgacaagccattatgtatatatattactattaattggaggacttgtaataggaggattacttgcgatgttcattcaccgcaaagagaaagataataataaagaaaatataaatctacttggaccaaaaaagaaacgcaaaagattatcatttaagattcgtcttccaagattaccgaaattaaagatgaaactatttaagtttggtgggaaagaatctaaaagtaaaatgccagaaaaaatccatgaatataagtacgaagaaccagttgcaacgtatgaaatgacagagaaaatagatccatacaaagaaaatgcagttcaaggtcaaacaaggatggaacgccgaagaaataggtataatgcataatgaagtttaataaccccgtaatgacttatcttaatattgataaatcattacggtttttttatgtaataaaatgaaggttgctattgcggaggggaatagcatattttatagataggaactaaaataaggggaggataaaatgcttatcattacatatatatctgcttgcatattattcttagttagctttttacatgtatattgggctttcggaggtaattgggggacaaatagtgttattccaactaaatcaggggaaaaggcgtttacacctcgcgcccgaatgacattgttcattgcattattattaagtatggcagcaataattttgttgcaacaagcaaatattgttcattttgcagttcctaatgttattattcaagtcggttcctggatttgtatgattgtcttttctattagagtgattggtgagtttaactattttggtatctttaaacgacaaaaagatacgcactttgcaagaatggataccggtttatatattccactttgtgcatttttatctttatctttcctattagcgataattttgtgagtgaataatagtagtttcttttctcaacatatatgtaaacgtgagaaatctaagagtaaataaaaaggatgtaagcgccttcttgtcgaaatgtaaattattatgaaagaccaactatgagaagtcaaggggagttttttatataaatagggggtgttttgtgacacaaaatatctaccagaagggttccgtctaactgtagcatttacaatacgtccctctacttcacgacttttggcaaatcgaacaaggcctagtttcggcaactttattttattccctataatggcaatgttttcatttgtttgttttgtggtataagattgtaagttgttcttcttagatttaaagcgcggtgcgctattttgttttttaaaaaagcgcgtataagcatccgcaaggttgcgaacggacgactgaatcgcaatactatccacttcttttagccaaacaagctctttcttcatggcaggtagtttggcagagcatgtaccataggtcaagccttttcctgtctctttgtatgcatgatcccataaggataggaaataattgaatacaaaacgagaacacccaatcgttttgttaattagaattgcttgtgcttgatttggatagatacgaaacttataggctttattcatcattatttgattcacctccatttcggtatatgaccattatacaccaaacgtacattcgatagatagtggagtaatactttctatatgtcgaacaattaagatggcttcccgccatcccttgttcaaacccaattcatctcccacctactcactggactgtgacccttcacgctccttgaggaaggagtcttcttggctaaaatgataaagaattatatattaatccacctttaatttttcttttacctttgtagggagttcaccttttttcacttcttcccaagatttcacaccttttttctcagagtaatatatacgtaaaaacgcttctttacgaaggttttttaacgctgtaaactccatttctttctctttaccatccttatcaaatccaggtaatttatattcgtaagtcgtatccccatttacatttttctcttttaatttttcaccatccttggtaatttgcacataatatgtatctgtaccaagacgatttaaattacacccggataacaacacagtaaacatcacaaaaaagctacacataagcactattcgtttcatattattcacctcatatcttttctcacaaaaattatatcctaatctattggctgccaaaattcatttccattacgctaacattacgtttttgtaaggtagtaaaaacagcttaaaataaaaaggatataaattcatatttctattgaattcatatcctttgttcttattgagtaaactattttgccccatgcttaataggaggtatttctattattctgggaaaataaagctagagtcctctccactattagcggtatcttctttcgggaatgtaatagtagatccttcatttcccttatttcctttatttatttcttgttcctcaggaaatacaatggaagaatcattacctaagtttggtgaaaaaccaagtttagataaaatagcttttaagtcaggtaaaacaccaattttatcagaagttggatcatttgatttcgttccggtgctagaatcacttaaaatatccctaagttgacttggtgtatatactctcccctgattattttttgctattccttgaattgatgctgcagcaccagcaataataggtgatgcgctagatgttccagcaaaactagatgtatataaatttgttataaattcacttggtttagcatctgtagtatctactgcattcccccatccatacacatccactctactaccgtaattagagaaatatgaacgcttatgaggaacccttgcagaagctgccccaaccataattgcccctgaatctttaaaatcaggactattacgatttaaaacttgtttaccattacggtctctaaattgatccaagtcatttccgccatttgcacctgcttcaataataataattcccttatttgttcccatacgaattgcatcaaatatgtctggttttacttccacaggaaaatagttcttatctccatatccatcgtaagttgcttgtgcctctagtaaaagaatatctccagcttgcatattgttaaccgcacttaaaatagcatcagctgtattataatttccgttatccctaatctgagatacaacctttaccttagctttcggtgcgatcccaattccacctatattattatcctctgccgaaacaattcctaagactgaggtaccatgatcatggtgctcgcttttattctgtccagatatcagttcaatcttttgattcactaaatcctcatgattaaataaccacccatactccatatctacgaaagtagttccttttccatctccaccttttatgctccaggcataaggtgcattaattcctaatggtgctggttcaaggtaaccttgtcttgtaagtctaggctcatcatatggattaacagataagtttggcaaacgctctgctggtggcgcctcttcttcctgtaaatacgccgtttcaacaagagatgatttttcaaattttgtaagtaatgcttgtacatcaatatcatcttgagtttctacaatataatagtttagcaaattagaagaaatatgatcggaatcttttatttctttacctagatttttaatttctttaggatttaaagaattaaaaagtcgatttatagttacatttggatattcagctaaaattctaattaattcaggatcttgtttttcttctttaatgaatttttctattccatcctgatatggtaaattcacttcatttttaaattttaaaattaattgtttagtaacttgcttatgtacagtagaattcaattgcttatttgaataattataagtagctgcgtaggcaacttctgatttttcacttggaagtatactgcctactccattaaatgctgttaatgcaattgaagaaactaaaattcccttaaaaattttcaaaacatgcacctcttcttattagtatatagttataaaaaaatgtatattacctaatttctttttatacaaacgttttatatgtagaactatattttcaactccattcattctttaatatttgtttatacatcattaatacaaccaattcataccaacaactttattaattcagtcgcattactgtaaccagtatagttacacctcgtgaaatagtcaaccttaaatgcaattttgcatttaaaatcatacatacttctaccaacttactcccaattatttcaagagaagttgaacttctatcattttgagtaattgcatatatataatataaaacatataaggggggttaaaacgtggtaatctcaagacaagattcctggactgatgataacgatttacttctcgcatcaacagtacttcagaatattcgtaacggtggaacacagttagctgcattcaaagaagtagcaaaactactagctagaacacccgcagcttgtggatttcgttggaattcatatgtgagaaaacaataccaagaagaaatacaactagcaaaacaagaccgaaaaatgggaaacaacattcccctctccccatcagaaaaagaaaaaaactctttgtctattacattagatgatattattctctttctacaaaattataaagatgtgaatgaattgacaaaattacaaaatcaaattgaagatttaaaaacagagaatcaatctcttctacaacgtatcaatatgtatgaagaagaatatcgtatgttactgaaccatatcgataagacaagaaatttaattgcagtggattaaacagcataactataatgactttccagtaggatcttcgcccgccaaaaccaccatcaataaagaaaattcagactattattggtaataataagtaaaatacacatacataatgtatgtgtattttactttgactattattaaaagaaatatttagtctatgttacatcttttctaatatttcttgcctttcacaccattttgttagcttttctaatgcttttttagataaacgttttgttttataattacaaaacctagataatgtagacggagaaatactcatttcatctgctatttcacgaatgcttacctttttttcattgtgtactttcagtattttgtcacggatctttttctctatttgttcgactgattctacagtcttctttatttctttaacaactgttacttccggtaactgctcttgtggttcctctatactcttctttcctattaccctatccattgactgtaacatttcttcaggtggcaaaatcgttattcctaagttagtgtaataatttttaaaccaattacgtttcccaatttgttgttcatccagtggatcactatactcccaatgagagattactttttcattttctaaatccattagaacgttttctaactgttctctaatacgattaggcttccaatctttcgggatatccattactgctagcaggcctttgtccccacctatagaatatggctttttcaatgatgaatacatttgtctaattctccattgccatgttaagtatcgtattaaccttttatgatatttgtgtctataactattgtattcaagtgcttttttagacaataatgctgttgtattatttgatccgtataaataattggttaaaaagctgcctggcttaatacgacaagattcaatacccatatattcatttgtaacactatgtctccacaatacaaccgaatctaatacaaataatcgtttaacaacctcacgctttaattctagtcgttccccttcatcttcacggtcatttaatactacgacttcattctcatcatttaaatagataaaaatacttgctaaagctgcaattctttttgctattttaattttatcttccgctctatagtattccttatttttgactactgtttttggaatgttgcacatctctaaaacttgctcataagaaaaatcaatgaattcgtctggagattttgcttcgtttatccattgtattgtaattgcatctaaacaatctgccgttaaatcatccatattactcattacatcatcaacaagagtattccatcgagctgcttcttctatattagtaagtcttaaatcttcatctttgtgtgaagaaagctgggctacaccattagaagattttgtttcaataggatattgtaaaaccttactcagttcatcttcttcaaattgattttttgcaatcccatctcttagcttataataaacagcagagttatttacctcataataatcctcatggtttactatacttgtctcttctatattttgatcattttctactattatggaacttgaagaagctatattttggaattctttgtctataaatccttcaatttctttatatatttcttccttataggaatcaattttggcataaatttgtactaatgtagtaccggattcttgttttttctctagccaagacactaatgcagtaaatgatggggaagcatgaggtgatgtgagtactttattattattgttttcaacatctttaaaatatgcattccacttattccatactagctcgttagttttataaattggctcagagattaacaatgcatctcgaaacatttgtaataagttatccactttcttttcctccctaaaccatggatcacaattaaataattctcagtataaaaatcttaactactattatatttaatttattgtaacagatatttacaaatttttgtttctttcttctctattctgcttttcttgcattccttttgcaactttcttttctgaacttgcaacatgctgctctttcttttccctatttcttcttcctacatttcttttgcgccttgctttccttaactcctcaacttgcaacatactgctctttcttttccctatttcttcttcctacatttcttttgcgctttgctttccttaactcttcaacttgcaacaggttgctccttctcttccttatttctacctacttgcatttcttttgcgctttgctttccttaactcttcaacttgcaacaggttgctcttcctcttacctatttcttcttacttacattccttttgcgctttgtttgccttaactctttaacttgcaacaggttgttcttcctcttacctattttcctttactgacatcctttttgcgctttgctttccttaactctttaacttgcaacatgctgctctttcttttccctatttcttcttcttacatttcttttgcgccttgctttccttaactcttcaacttgcaacaggttgttcttcctcttacctattttcctttactgacatcctttttgcgctttgctttccttaactctttaacttgcaacatgctgctctttcttttccctatttcttcttcttacatttcttttgcgccttgctttccttaactcttcaacttgcaacaggttgctttttttcttacctctttctccttacttacattctttttgcgctttgtttgccttatatttctcaacttgcaacacgtttgctctttctcttacctatttctaatcaacttgcaacacgtttgcggtattctttccctatctctttcaacttgcaacagtataatttatttctcaactaagtaattctaaaaaaaatcatgtcattttaaagttttcaagctatttttctcatattttttataagttacatacataatatgcaacatgtttgcggtatcctttccctaacttttctatcatcttcaccataaacctttatataccaagggtttaggtgcttttccatttacttttatacatatcatccaacttgcaacacgtttgcggtatgcatgcccttatttttctcacaagatgcaacagtgtttgcggtatcctttccctactttcattctataaatgtcaacaagtccttttatatcaagggtaattattacaattcatttttaatcattacgttcactaacttgcaacatgtttgcggtatcctttccctaactcccctaccattttcactataatcctttatataccaagggtttaggtgctttttcacttacttttatacatatcacacaacttgcaacacgtttgcggtatccttaacacaaaaaaaaatcatgaaattctcttatcccttgatacaactagcttcataagctgttgcaagttgctaattttcttcttaaaggagcacctttcatcatttttcgatttgctataatcaaaattggtatattttatagtattttgacatatatttctgaatttgtagaacggaggtgaaaaagatgggaaaatcatttgtgatacgtaatcaacgtagcttaaatgggaaaacaacaaacgcagttttagtaacactcaaatcttggcaaaagtttgtggaaacatttgaggagaaatactacagctataaagatacatatttagaagatattttgcagcacatgacatacgaagagcgtattgcggatgtagaaggttttgttgaaaaagccaaaccatctttttcacgtcgggcaatgtctacacttgcagaaaaagcaggacgaaaacataaattatacggtattacgaatgctgatcttgaagtgttcttgtacttacataaaaaatgctatacaaacggcgtcattccaaatgtaaccatacatatgatgtgggaagattacaagcaatataaagaagaatttgcttatatccaacactctcaattctatatcgcattaaagaaattaaacttacataacattatctccatcgaaaatggagtagatggccgttatacaatcaaactcactcattttatgaatgaggaaacagaaaaagcaaatccgtacgtatatattagtcctgttgtatttacaaaggatttctttaagctatctgtagcagctaagaaactattcttagacatcgcaatgcaacaacatacggaaacaacattaaagcgttctttagacaagcaggacgaaagaggaaacaaaactcacttcggtgggatgtatcgtttcttacataaaaaatatccgcatcagatccgtgcggttatcgaggaattaacaactgcattaccatgtacggggaatcccctattcaaaatttgcaaaatgcaaaaaggtgtaaagcatacaaaacgatatacaacattatatctgtctatacattcagacttcttatgttcgaaagaagctggagaagaacaacatagggatccatttacaccaaaagctacctatgctcgaaaagcgaaatttatcgaagcagtcctacaagagatgaatatcggtgaactgtctgcagacatgaataaattcattcatgtcttaaagcatacttgtcaccgtcaaattcgcagtgtcattcgcggactacgtgacatggttgatcgaaaagaaggatatccaacgaaaattgtatatacattgaagaaactattgcatcaaacatctcaatatcaaattctcgatacagcagctaaagaaggtatctaccctcttattgcgcagcatataccaaaagagagaaatagcgaacgtgagcaagctatctttaatttcggcctacattattctatgtactctcttcgtaacattaaaaagatgtttaaaaatgtgcatgcattattgaagcagaagtttgcggtaccagtaacagaagaatcttatcaccgtaattatataaaataccaggaagaaacgttatttagaaaatatgcatatgatcagggagtgaatctccatgcatatatcgctttagaaattgaaatgcgtgaaaaactaaaagttcgtggtcataaagaacgcacaattccaagtgatgtacgtgaatggtttattgaaacaattgataaactaccacaagaacaactgcgtgtgattgagctaccaaaacagtttaatttactagagtttatgcgtaccttcgaacgcttagtacgtgctggtgtaacaataacagctccagatcaggtgctacacgcaatggaaataaaataatagtaacgagctctctatttttgaaaaaatcgaaattagagggctattcgtagttgtttcattcatactctttttctactactctatttataaatacaaaatcagaaggacttcatgtaaaatgaagtctttttttatgcacttctatacaaattctcttctagcactatataactctccacatagtgccagggagtattcttctaatgtaataaaacatacctcataatacctacaaaaaatcaaaaataaaattataaaaacagtggatatgaggacaaatatactcgaatgtgaatagtatttttctgacatcattgtaactactagtgttgttgtatatatctaataaaaatcatcaataataatgtgagttatgtgtaaatactgagtaatgttaacaaataactacattttctgaacaaaatgtggataattgaacgttaaatactgcttatttaccaaaataaagtaaatgaagcttatttccatagttgaataaatataaagtaatttgtatcaatttctttccgatttcatgtagaaacatatgattttctttttgcttttttgtagaattgaaagtcttataattattgaatctacggatacattttttactatttatgattttttacgtgctaacatcaaattttcccttgtgggagtagagtttccccctatttttgataacctataatagttttatctttatttctttttaatatataagatatatatttataatagattttacaattactaatatgattattaataagatgtcagacctaattgaaaatatttgtaaaaaccgttataataatggtaattaaacatatcattactcccatgtaaaaggacaaatctatgaatccttattaggactagatttgtctttttgtcattgaaaataaaaaacaacatataaaaaaggaaaagggttgtttgtccgttttccttttttatatgccagcaaccgagcgcagcaaagggcggtagcaggtctttcacttattttttgttataatatatgataagaatttaggtgattataaagaacaagggtattagtatagaagtagcattagaatcgttttctgtttatttagcagaaaatggacgtaaacaatctaggattgaacgttataattacgatattactggtttttataagtgactaagagcaaatgagaagctcctagatatcaaatcatgaagtgaactacctaaagaaaattattaggagtatttctatgcgctagaaaacaaggcacagaatatggccgttcttaaataaattgaacatgtctttagcgatagatacttcagtagatgattttcacccctcataaattcctgatcaatcactaagtgataaggattttattaccgaagcagaagaaaaactattaaaacaaactaccctttcaacaaaaggattaacagaaagacacgttgaatatcgccctcttattatggatagaaacgcttctataataaatttagtagtaaactatgggttgtccttacaagggcttgtatcgcttaatatgagccatatacagcttgctctttaattgttccaggagaaaatggtgtaactaggtctgtttccttaaccaaggaagatacaaagcatctttacaaatactatataactattcctgaacatgtaaggcttagacggtatacagataatcctttgtttatagcatttaattttaatcagggaacatatcgttgagtttacgaaaaagatgcgccaaaggctttgtctgaggttgcaatacaaaagatgatacgacttgaattaaaacgtgaagggttgaatagacatatcttggcgcagcaaatgcgaaatacattcattgtttgtcttattaggcaaggctcttaattactgttatcacgagaggtttagaagtgtataaacaagcgattagctgcttatatatctgtattagcctagatattttgtaatgtcagtgagatatcagcaatcatagaagtgtttctactccaacctaggaagccaagatatcaataggttttgtacggttctctagcagaatctcagcaattgtattacataatagtgacaacggactatcttttccccactttaacctacaaaacaacaatctcgagataaattgacttttttcatttcctctttaatttctctataagtattcatcattataaaacttgccccttcttttttacatagaaaaagagagtcccttgctataggaaccctctcttatgcatatcctctatttttaatcaatcacaatttcatgtatatttagcttgtttaatttttcattatagaaactcattactttttgagcatgttgagccattaatccatcttggacagtaagtgcttcaaaatacggataacgaatgtttgtaacataaccattcagctgcacgtattgttctaaaatcaatgagaactcctcatctaatttacgacaaaatttgtgcagcattaaaaggttatgagttttaggggctgttctaatgtttagtgtaagaaatccttttagaggtttcccaacacattgttgactatggtaacaaataactgaggcagggaaaggtttcatgtgagttaagtacctagcagaatctaaattagattttgcaatgaatagcaactcttctagatcctcagtatttttcatataaaacttgcccccctagtgcaattttgtattccatggttacattacggttagcacgttcttgaaactcttcaggtccatatactaaaatatcaactggtgtttccatcacatcgtaaataccccaattgataagattaatcacttctctttttcttgttcctacaccatccacaataatacaaagatcaaaatcacgatctttatttggtgtaccataagcatgagagccaaaaaggataattttttggacagaagacacggtctcacaaattttttgtactaataggtttagctctctttgtacttcctcgttaatccaaatcaccccttggaaaatagaattatattgacgtttaagtatattatatatgcgcttctcttctccttactattacatatttattttcatattgtgcccttatttcccaacgtccttcaatgcttaataacatttgtaaaccttcttgaagtcttgttagaacccatcatcacagataccttattccttaacttgatgaaggacgaaagtccaaaggtaagtgaaagttaaattaggggttacttgtaatagaatgctttgttcctctgtagttgtatatgaagcaatgttctgtatgtaaatacatctaaagattacctttccagtggtctttagatgtactccgcaatttaagttttttagaaagcctttgtttttaataatgatatcttggaggtagtggctgtggattgagttctacaaaagtaccaggaggtagtggttgcgggttgagctgtacaaaagtattccatgacccatatggaatatactgcataggatttggtgtaaatgatgtatatacctgtagatgacaacacggaactatatgcattaatatttcatctccttcaaaataataattcgttcatgacaacttatgtattttagatttaagtaaagtagtaatactacctaatttttaaaaatagttaaatccaatttactaggacaaaaatacattcatacaatgaatatatttttggatgagaggggatattttatgggatttgaaccaaaagacacagtcttaaaaattgctgaattggataatatccgcttaactaaaatatactttgccccaggctggattgtattcaacagtagtactggggataaaagcgatgtttttatgtctatatctaacgttactggtacagttatgctaaattctgataagagtagtcaagttagtttttcatacatcctaaataacaacaggaccctcttgggggaagtagtgtggaatccggtttttaagattctttatttaaccaaagatggagggttccttactgaatggcgggatattgtatcacctgattctaggttaaagaactatactgtcacgcacacgtggactattccacgcaatatttatgataactttgggaaaattcgtacttttcttagtacctcctcagcaccttggtatccttgtcctaggtaacaaaaattattagtcagattataagaaataggatgtctcaattttaaattattggcttttatcgctaaaaatttaataaactgtcatctaaaaagaaactctaggttagtcaataattcgtatagggtgcagtttctatttcatttacaatatttattatacatgcttctctgcagtgtaataaaaaagacattgaacaaatacgtttaatgtctttttccctctaatatacttgccttgtttatcttgtatttatataccaagtaactgcttctttttggcgttaaactcatcttctgtaataacccctatatcgcatagctctttgaatttctttaattcgtctgctgttgatattggagcagatactgcttgtggttgagcttcagtaggtttgctttttaaagcatctagaacttgatggatatgattattaatggattttgctgaatctttatctaacgcaactttgatcttttcttgcggagtatcaattgttagaaagcctaaccacatccctatttcaaaagatatatcatttatcttttcatgatctactgctttgaatttttccccagtcattgttttttgtccgaacataatgcgtttattacttatggcgtaggcataataaccatcatgctttgttgtagattgataatcgtgcattccgatataagtcatatgtattttttcgccattcatcaagttatcttctaataccttgaagtgttttacaccccacttttcattaaagccagaaccgaatgtattatctatacagaattgatacattccttcagcgcatgacaatggatcctcagcaagttttgctacctttgcatcgattgtagctttcaattcttcgatagtgtccgtacttacacttacaacacccaagccacctgctttatgaaagcaatctgggcatagccatgcgtcagattttagtattttataacgatttaaaccaacctttatatcacaaacaccacatactgcctttttaaaaaaaaccataattttccctccagttatatatattgaatagtagcaaacaaacctaacattctacgtaatattacaatttataaatataagtataacacacctaaaacactataggatgccaaacaaagccttaaccatttgtttctctatagtttaaaaggaaaaaagacattgaaaccaactgttcaatgtcttttttctttttaaatgtttgtatactcaaagtataatttttctggttttccatacatgttaatttcattttgatatacgacagctaatggctgagacatctcaatgctttccacataggataatgaagcagttgcttctattttttctttaatctcattaggaatggatgagtaagataagttattcattttacttcctagtttagtatctgtagcagcttcataataaatttcggtaattaagacttcattatcatctggatcatacatgtatcctcgattaactgtaatcatattatataactcctctcaagtttcatattctaattccttgtgcttttagcattgcaacaagtactttacatatttagattcccttgttcttctctttcgaatgtcagtatgaattgattcttattaccttacctaatagttaaattttgggatttacaataatataaaggtttgattttatagatagtaagttcataacatttaacgtgttaattaatttttcttttgaaagttttaaatgatttcccctattgataatgttggcttatctaaagtaattgcatgttcatatttcatcataaatatcctcttttctaaataaaaagcacgaaatatgtgcgttttatccatatttttttatgctatactctgtaaaaattcatataatctctcccctaaattaaacaaaaagcacaaaatttgtactttctcatttagcatacttttagtcctaaaggtttatgtataagtgattcctaacttgaagacaacacaaaaaggacttcttcaagtcgattaaaatgtgcatagcaaaataagctatatatacactaatcggctcaaagaagccctttcataattgaaacaaaaatataacttgtttctaaaactcaaccacaacacatagggcgtgggaatagacggaatcaattaaacaataaatatagatttatattaaaccatttttatattatattcaattgttttcaatagaacagagataagaaggaagtttatatgcagatcccacatgtattgtataataatgcccctgattcccctgctataaatcccctcttatattcaggccctggtgttacttcatgtactgtatttcaaaatatagtttttcgggcttttgattttgaactaaataacaaagtatttccttaatatttttttcttctacttcaacattttccatataggtcatactttcgttttcctggaccttttcaaaaatagcaataggtactttaactggatcaaatatccccattttactgcctaactttttttctgatgtaccatcatagaaaatttcatttactattacctcattattatcaggatcgtacatgtaccctctttgtatacgtagcaatatagtactcctttcttgtatattcctccaatgaaataactatatttgtatataatgttattttattaacaggtgtcaaagaatattatttcgcaaaatccttgctttgtatagaggtagatacaggattattaattttgttaagtttttttgaatatttcaagctaattataaaataaacaagccacccttgaagcgaaagcttgtaaggtggattagttttctttaaatagctttgtatctaattgtttaatctccccttctgcaagaggttgataaaaagcgtgttgtaatccttgaaaatgtaaagattcccctatgcataacaatactttaccaggaattaaatcaagtaatagttcattattaattttctttgcttgttttttagtagaaacataaataactaagattgtagggttattccctaagtcctgcataataacatcttttcctgactctacaaaagtctgccatctagcaattattcgttttaatcgatccttttgatcagataataaggtggagtatacaacaaagttaaatttacgttcttttcctccatttactataaaacttaaagaaggggtaaaaacccctttactaatagatggatgcataatatgacctaaaaatgaaggagcgtagcgtaaatgacaaagtaggtctatgtcatgccaataacgtaggtgaacatatttaccatgattgtcaagacgctctggtgcaaagaagaacatattcccttgccagtattttagtagtttaaatccattattggataaggtatatgtttcttcaaagatttccatatcaaaaatttctacttgccatttttctataaattgatagtaaagtaatccttgaagtgcattattaattttcttccgtgaaaatttattcttgaatagatataataaatgattaaaccgaacagatgtatgaacaccaatgaaattgagtatagcatattgttcctctgttaaaagctgcttaaacttaactaattcgtcataagagtggaatacataggttttatccaagtcatgtatccgatatatttgaagtccttgtacatcctcacttgataaatgaggaatagaaggaatataagtagacatttgtttctttattgtacgcataatcatctattaaaattggtaaattgacgaattagattttttactttggccttgcggataatttagaatacgtacagttcctcttctatttttagcatcaatattaagcagctcacatgtaacaattgtttggtttattgcgtcatccacggttggatttgccagattacgaccctttaaccctttaaattgaatacctggtgcaacttctacgaaaatcccagcaatagcatctacacctacaattttacctacaaagcggtcacgtcgtttgtttaattctaatagtttttccattggatccgtttcaagtttctttttatttcctctaaactcatagcgcccatccttttccactactttatcgatgataagctctacaacatcgccaataataatatccgccgaacgaacgaatgaatgagaccattgcgagtatcttactcctactgttacaccatgaacttcaaccagaatagtttgtgcagatggaatatgtccagaaactgttcctgtgtatactttattcccctcttgctctactatttcttcatataattttctttgcagtgcaagttctcctgcagtgatagatacaacagcaaagttcccttcctcagttctttggaaatgctcaataataacgggttttgttttacctatcagccattgaggatttttaggaatatttatacctgcctctgtaagtggacaatatgctgtcgtatgagtaccaatttgcattgtgagcacttgtatccgctcagatgtcccgtttttagttgggaataatttttcagatactattgtaattaagcctttccctacagtacgttcacgtttcatacgagctaattcttctaattcatgttcacgtattctttcaaattgattgaaagttgattctataaagatgtcctctagcgtgttatccggttcaaatgccatccctagttcttttgtaatatgagtatttaccttatcttcaaccattatattttcctccttgaacgtaaaaaaggacacacctgtaccgttggaatggtacgtaaggtgtgtccttcacgtaagtcatgttttatttgtataattattaattaaaatataacgtttttatgtaatttgtgcaagtattattttttgaaaagggaaaagttaaaatactatatctaacctttcctcctaatttaagttagattttccctaaaaatataatcttgaataaaaagttattttaggtttctataggtattaatcaaaaaaatcatctaattccttactcattacattagatgtatttttcttttgttgctggtttttattaagtagtgaatttgtattgttatacgtattcttttgtttggcttttaagttttttttgcgttctttatagtcgatatgtttatcttcatgctgctcttcattatttctagtgttctctaccatattcttttctaagttttgatgaacagtaatgctaatagattcgtaaacttttgcaacctcttcatcaagtttattttctttagtgggattaactgtttttgtagctggtttcaaattagttttcatatctgtttttgtttcctctaatactgtggttataagtccctctgttagaagctttttttgcaatggatcagtttctacaggaattcctaaatgaattgggtaatctatatccctttttggttccagcatagtattagatacctctttcttccgttctgctagctccatattttttttaggacctactatttccctatgtgtctcttttgttatattcggcagctcgccattccgttgtagggcatcttgtaatcttgaagcacgtgtataatcaattttaaatgcgttctgtagtgcatgtatagaagaattccctgatgccttaacaaaggctactacatcatcatataggatgtctttaaagaagcctgtttcctcttgctttgcttctgatttttcgtttggaatgctattttctcgtgaagtcgtattatctaaatctgtattagatgaaggagtagtattgatttgagaatcctttgataatatcaacgtattattattgtttgaaattaaaactttacgagggctattcccggtgtaagtgctcacaatgtgattgtgttctaacttctcaataaattttacagcctttatatggctgattctgaattttctttgcaaaagagatggtgagatttgttgtgattcaataacgaatgccttaatttcttcatacaacttattttcagtttcttcaataacatttccctgttgactgacatccttaaaataatcaggaaaagttacattttctacagtgtttgtttctatggaattattttgttctattttatcaccatgcataggtggaaatgattctatctgttttttattatttgcatctacatgtttcataggatttgattttgcgatagattcttcaatgagtcgaagacgttcagtttcccaatattgtccagacttgatctctacttgaatgattgcttgagtaaattcctctttgggtacaaagttactagtaatttgttgtacaggttgcacatgattgtcttgtacaatacgcgcagcacaaatgaaggcaccttgtgccataatatctcctggtgacataacgacttcttttaatttttgatatgtcgaacctaagcgactaacgggattctcttgcataggagaaatcccttgttcggattcggattctttaaattcctctgtttcaccaaacatgtcagagaaaattttcgcatcatatggtgttacatcaccaaatatcatcttgttacggaacgaacctagtaaagtaaacatatactgctctgtgaaatccaaagctaattgagatagtgtttgacttgcaattgtcagaatgactttatatttacgagattgtgcagggaactctttgaacgggcgcacaaatgtgtagcatcctagcccgagagggctggggtagctactaacccttacgggattttgtacatgcttaaacaagcgaaaatgtacatgtttatcttgacatttacaaagagatgaatatatttgaattttattaattaaatccagaaaaaaatatcagaatagaaaatgctttaaggcctatttgcagttgaatatttatggtatgaatattgccgtatttcttagtatgctaaaaatacaagcctgtaaatcactttgttatgactgtaaagtaaaagaaggatattgaactattttattatttataaggtattatatatactttgagattcagaaggtttgaataagttacgctttatatgccgatattttggttcaactagagtatcaaatgtggaatatttctttgctatataaaacctttacttcttaatcttatataagcacaaagtaaaacataaggggatttttgaaaaaagagtattatggtctagtataaaacttgtattttagaactttaaatatattaagataattcaaaggggaaaataaaatccaataatcattaagatggtagtttctttggattcgtttcttaaaatatctatttttgattttccttatctattttgtaataaaacttttcattaatagatgaaaatatgtatgctttattaggaaataattaaggtatcttttaattatctataattatttgttatagaggaattagataattgaagttcttttcatttgggaatacggtgataaaaaaggagggacggagttataaggatcaataagaatacataattaaattgttttacaataaaacattccattctcattaatattcttataatcacaaaaaccaaatgctataaaatggattgtttgaaaaagttgtgaatatgcatatttttggatgcgtgtacaattataatcatcatgatatcacttctcttttaagaatgcgaagttttgtcgttatgtaaacatgggtgctcaaaactttacattttttgtacaatataaaatattaaaatacagttgtacagataattgatatttctttatatgaaaaaatgcttataaatactatgcaaagctaacgtataattttttagaccttatagaatcaaataagaataaagatagaaaataaaattgaaatactaaggctagcaaagtaacgtgaggtaatagcatctattctgagttttgtagttaaatgttacctagtgataagtaattcagtattaagggaggagaaatgtaatggataaatttattacagacttaatacaagataaatcaatagtacgacaacttcaaattttagaaaccttgattgatagcaatgaaataaagtcttccaaggatttatcacaaagtttaaagtgtacaagtagaacaataataaatgacatttctcagttaaaactagcgcttcccgaaaattgggatttaataagtgttcaatccaaagggtacctattaaaacgtgatttttcaaacgatttctccgaattaattattccctatttaatgaatagtgaactttatacaatattaatcggtatatttaatcaaaaatattattctttagaaaaatggtcccagttgttatatctagataaaattacactaaaaaaaatgctgaaaaactttcggaagatacttgtgaactttggattggattttaattttagaacgattaaattgattggccaagaaataaacttaagatatttttatataatgttcttttataatatccaaaagtataaagaagtaatcaatttagattctagattacaagaaaaaattaaaagcattactagaattcacaatgtagaaatagattataatatgctagcagttattattagtgtatctataaagagaattgcaaataaacattatatgtcagaagttttagagtttcttcctatacttgatacaaataatttaaattgcataagttcaattatatgcgaattggaaattttcttcaatataaaattcacagaatatgaattaagttattttaagaatgctttttcaataatattagaatggaacattgaagaaaaaaataggatcacagattattattataaaataaacaaaaagacttatgataaaaacaaacatttattccaaacaatatcttctgaaataaatgtttgtttagaaataaaagaaaagataaaacatgacttgtatttcattttacataaaatttacaagtttcaaaagtatggtttatcaataggcgcttttggtaatgaatttgacactgtacatcatgaattttcagaaggacataatagaatttatcctcttatttcttcttggaataaaaaaataaataaaagtagattaactaacgatgagatcaattacataatataccatattttatttattgtccattcaaatcataataaaaaaggattgttattattatctggttcatcagctttaaagaagtttatttattataaactcaatcacgagctaggtgattttgtaacactacaacaaaaaccagattgtatgcataaatttgatgttattctgacaaattatcaaatcccgaataccccaatacctataattcggatctcaaacaaaacaattcaaaaagattcaagttatgttagaaaagttttatccccttttaactaaacttaaggttttagttctaaataatgtatactttccttgtatggaataacttatatgaaatcgatactagaaattgataacatgtatttattttcaattgaagaacagaatacttataagacataattgatttttacgtattgtttgaaagaattctcttaccccaagtgcgtaacgataggtaggagattcttttggtttggcttagccaaacagcgcgtaattgcattttttattttctttattatgtaatcagtcatgcataatgaaaattttgacatgtcaacaaaattggattttaagaacgattaagtgttcttgttatactaccaatagtgtattgacgtgaaatacataaatgataataatttatcaaactatgcagacttatttttcaggttatccgtgaattataacataacactgctagtttagaattatgctgttgttttatattattaattttacatataacgattaatgcttttgaatgcaatttctcgacttaataaattagattttctcaaagtgcaaaaacatccattggtaaacaccttctgcccatcttaactaaatatgaaaaaaattgtgcaaaaagaaattgaaacagttataggattatactttagttttgaatataagaaaattaattaggttaactacgaatttaaatgttacagctattgaaggactaaaaatgaaagatatgttgcaatcaatttatcttagaaaaaatgacactgataacggtaggggaatgtttaccttattttagtttttaaactacacgaacaatgaaaataatgtgtaaaaattcacaaatagattccctctacaaaaacatgtggcagctgcgagaggaatatgtaattttcagaaggattatatttttgtaagtacggtgtaactttcaatagagtctgtaatgtaaatatcaacatcaaagatgaaccaatatttttatcattttagccaagaattctctttcctcaaggagcgtgaaaggatacagtccagtgagtataggtgggagatgaattttcttcgaacaaggggtggcttcctgccttgaaaaaagagcttgtttggctaaaagaagtggatagtattgcgattcagttttctgttcgcaactctgtggatgcttttacacgctttaaatctaagaagaacaacgtacaatcttatacgacaaaacaaaccaatgaaaacattggcgttgtaggaaacaagataaagttgccgaagctaagccttgtttgatttgccaaaagtcgctaagtaaagggacgtattgtaaatgctacagttagacggaatccatttggtagatactttgtgtcattgttagttgaaacagaagttggtgaaagcaaagcgtgttctttctagaggaatgaaaggatcttcccactagaataaacagcgagtaaaggtagatagaattcatgaatatatggaaaattataaaaaacattacctggacaaaagctcaactgaaatcaccaaaaaccactatgttgttggtataaaggttttgcaagtatcgaatattttaaagaatcataagttagcaaaagccattaatgaagtatcatagtcgcaatttcgatccttgttagaatacaaagcaaaatggtatggaaaataagtcattgttgtatcgaaaacatttgattctagccaattatgttctcattgtgaatatcaaaacaaagacgttagaaatctagacctaggtaaatgagactgtccttcttatcttacacgctataatgcggatattaactcaataagccataaggcttctaatcgcaaggactgctggggtagttcaatagctctggtataaatagcagtaaaataacctttggtacaattcgatagttactagacgtaacgattagccgagaaatccccactttagagagcacgttaggaggttaagtgaagggtatttcacaaatgatcgattatatttataggaaaaggatagatcacttcatctatagatgaaattatctatccttttatttgttagataggagatataatttactcatagccccagagaaagtgttaacaggtgatagcatccaattttatagtaagggaggttttactaagttctaataattttctgggtaattagtccttacaacgacttacatttaggaaattgcctgttaataaaatttatatagtaaaggagtgctttaatgtaaaaaaatagggataaatgaatttttgtgaataggaagaccatttgataggtaaatattataattcaaaaagtagaataagcaaaattgagtaacacattaatgatataaactaattttatacaattgaaattgataaaaagttatgagtgtttaataatcagtaattaccaataaagaattaagaatacaagtttacaagaaataagtgttacaaaaaatagctgaaaaggaagatgaacatgaacaagaataatactaaattaagcacaagagccttaccaagttttattgattattttaatggcatttatggatttgccactggtatcaaagacattatgaacatgatttttaaaacggatacaggtggtgatctaaccctagacgaaattttaaagaatcagcagttactaaatgatatttctggtaaattggatggggtgaatggaagcttaaatgatcttatcgcacagggaaacttaaatacagaattatctaaggaaatattaaaaattgcaaatgaacaaaatcaagttttaaatgatgttaataacaaactcgatgcgataaatacgatgcttcgggtatatctacctaaaattacctctatgttgagtgatgtaatgaaacaaaattatgcgctaagtctgcaaatagaatacttaagtaaacaattgcaagagatttctgataagttggatattattaatgtaaatgtacttattaactctacacttactgaaattacacctgcgtatcaaaggattaaatatgtgaacgaaaaatttgaggaattaacttttgctacagaaactagttcaaaagtaaaaaaggatggctctcctgcagatattcttgatgagttaactgagttaactgaactagcgaaaagtgtaacaaaaaatgatgtggatggttttgaattttaccttaatacattccacgatgtaatggtaggaaataatttattcgggcgttcagctttaaaaactgcatcggaattaattactaaagaaaatgtgaaaacaagtggcagtgaggtcggaaatgtttataacttcttaattgtattaacagctctgcaagcaaaagcttttcttactttaacaacatgccgaaaattattaggcttagcagatattgattatacttctattatgaatgaacatttaaataaggaaaaagaggaatttagagtaaacatcctccctacactttctaatactttttctaatcctaattatgcaaaagttaaaggaagtgatgaagatgcaaagatgattgtggaagctaaaccaggacatgcattgattgggtttgaaattagtaatgattcaattacagtattaaaagtatatgaggctaagctaaaacaaaattatcaagtcgataaggattccttatcggaagttatttatggtgatatggataaattattgtgcccagatcaatctgaacaaatctattatacaaataacatagtatttccaaatgaatatgtaattactaaaattgatttcactaaaaaaatgaaaactttaagatatgaggtaacagcgaatttttatgattcttctacaggagaaattgacttaaataagaaaaaagtagaatcaagtgaagcggagtatagaacgttaagtgctaatgatgatggggtgtatatgccgttaggtgtcatcagtgaaacatttttgactccgattaatgggtttggcctccaagctgatgaaaattcaagattaattactttaacatgtaaatcatatttaagagaactactgctagcaacagacttaagcaataaagaaactaaattgatcgtcccgccaagtggttttattagcaatattgtagagaacgggtccatagaagaggacaatttagagccgtggaaagcaaataataagaatgcgtatgtagatcatacaggcggagtgaatggaactaaagctttatatgttcataaggacggaggaatttcacaatttattggagataagttaaaaccgaaaactgagtatgtaatccaatatactgttaaaggaaaaccttctattcatttaaaagatgaaaatactggatatattcattatgaagatacaaataataatttagaagattatcaaactattaataaacgttttactacaggaactgatttaaagggagtgtatttaattttaaaaagtcaaaatggagatgaagcttggggagataactttattattttggaaattagtccttctgaaaagttattaagtccagaattaattaatacaaataattggacgagtacgggatcaactaatattagcggtaatacactcactctttatcagggaggacgagggattctaaaacaaaaccttcaattagatagtttttcaacttatagagtgtatttttctgtgtccggagatgctaatgtaaggattagaaattctagggaagtgttatttgaaaaaagatatatgagcggtgctaaagatgtttctgaaatgttcactacaaaatttgagaaagataacttttatatagagctttctcaagggaataatttatatggtggtcctattgtacatttttacgatgtctctattaagtaagatcgggatctaatattaacagtttttaaaagctaattcttgtataatgtccttgattatggaaaaacacaattttgtttgctaagatgtatatatagctcaattattaaaaggctcttagaaaaaacgtatttaaatttaaagttaatgaattgtaaggaaaggcacttcattctcacctcgttatgtcatagaagaattagaatgtttcccagaaatagataaattatagttagcgatttgacaaacgaaagagaaattcattgtagacagtttagaattacgcattatagatgaatagttttatgcatagttgctttaaatgacacagtataaaagataaacatcactcttataagagtgatgtttatttttttatactgtgttctaacataagtgtatagaaaaacataataaaagtagggggggaagtgtagaggtaaatgaatattcttcagtagaagtataatatgatttttagtccttactaatatcagacgaaattaactatctcataaggcttatattgatggaggattaaagtgtttttataacaattggtgaataggtagctccttcatttatcattttagccaagaagattccttcctcaaggagcgtgaagggtcacagcacaatgagtaggttggagatgaattggcttgttcaacatacataaatcgcgactgcctctctttagaatacacgttcggtgtatggtagccatatacagaaatggaggtgaatcaaatgatgattaataaagcttataagttttatatctttccaaatcaagcacaagcaattctaatcaataaaacgattggttgttctcgctttgtattcaatcattttctttccttatgggatgacttatataaagaggcaggaagaggtttgacctatggtacatgttctgccaaagttcctgccatgaagaaagagtttgtttggctaaaagaagtggatattattgtgattcatttgtctgtttataatcttgcagatgcgtatacacgctttttcaaaaaataaaacagcgcctcgcgctttaaatctaagaagaacaacgtacaatcatataccacaaaattaaacaaacgaaaacattgccagtgtaggtaaaaaataaagttgccgaaagtcgcgaagtaaagggacgtattgtaaatgctacagttagacggaacccttctggcatatactttgtttcattgttagttgaaacagaagtacaagaacttccgaaaacacattcttacatcagaatggatatgggactaaaagattttgccattttgtcagatggaacaacctataaaaatccgtaattttttcgctcattagaagcgaaggtggcgaaagtacagcatgttctttctagaaggacgaaaggatcttctcgctggaataagcagcgagtaaaggtagctaggatttattaataaatggaaaaatatagaaaatattacttagacaaaatctcgactgaaatcatcaaaaaccatgatgttatcggtatagaggatttgcaagtatcgaatatgttacagaatcacaagttagcaaaagcaattagtgaagtatcatggtcacaatttcaagccatgttggaatacaaagcaaaatggtacggaaaacaagttattgtcttatcgaaaacaattgcttccagccaataatgttcttgttgtggatatcaaaacaaagacgttaaaaatctaaacctacgtaagtgagactgtccttcttgtcgtacacatcatgatagggatattaacgcaagtatcaatctaaagaatgaagcaatatgacttctaaccgaaaggactgcggagatagcctaatcaattagagttcgatagaattctttacttaggaatccctcacttctaaatgaagtgaaagtgggggtagttcaaaaaaagcatagatatcttcttctataggtgaagatatctatgctttttctttttaaattaaagatatactttactcatacggcagggaaaattattaacaggagataatatccaattctaataattgtataaatagtttgaacatgtttgaaaattaaccaaacaatttttgttttgaaaaatggattctctaatacacctgttaatgtaacgtatggaaaggagaatagaagcagttaagaaagcggtaaatggatgattaactagatttaagaaagatgaagggtaatttttgagaaataaaataatcaactggaatgattaggaatttcggtattgtgacagttttcaaattttatactagtaataaataaattactttttgaaagtaatatcattacaaaaggtacttggaatcttcttgcttattccatgattccaagaaaaatcgccatttacacactagtggaccaaaatacagaaacaagcgaacatgctagatttgcaaataatggtggtgtctcatctggtatatgctgggtattactgtagatgatttagggaggagcatgatggatggctaaatgtaggctttcatgtttaaagtatgatccttcctataccatatacaaattatgcgtataacaaaagtgagaatgattcctatgtttaagacttaattaataattataatcaaagttagagttgtaattgtggttgtaaataagcactttcttaaaaatattcgttattatcaggctaatttagtatctttaattttaatatattacttaatatttaaggaggaattttatatgaatagtgtattgaatagcggaagaactactatttgtgatgcgtataatgtagcggctcatgatccatttagttttcaacacaaatcattagataccgtacaaaaggaatggacggagtggaaaaaaaataatcatagtttatacctagatcctattgttggaactgtggctagttttctgttaaagaaagtggggagtcttgttggaaaaaggatactaagtgagttacggaatttaatatttcctagtggtagtacaaatctaatgcaagatattttaagagagacagaaaaattcctgaatcaaagacttaatacagacactcttgcccgtgtaaatgcggaattgacagggctgcaagcaaatgtagaagagtttaatcgacaagtagataattttttgaaccctaaccgaaacgctgttcctttatcaataacttcttcagttaatacaatgcaacaattatttctaaatagattaccccagttccagatgcaaggataccaactgttattattacctttatttgcacaggcagccaatttacatctttcttttattagagatgttattctaaatgcagatgaatggggaatttcagcagcaacattacgtacgtatcgagattacttgaaaaattatacaagagattactctaactattgtataaatacgtatcaaagtgcgtttaaaggtttaaacactcgtttacacgatatgttagaatttagaacatatatgtttttaaatgtatttgagtatgtatctatctggtcgttgtttaaatatcaaagtcttctagtatcttccggtgctaatttatatgcaagtggtagtggaccacagcagacccaatcatttacttcacaagactggccatttttatattctcttttccaagttaattcaaattatgtgttaaatggatttagtggtgctaggctttctaataccttccctaatatagttggtttacctggttctactacaactcacgcattgcttgctgcaagggttaattacagtggaggaatttcgtctggtgatataggtgcatctccgtttaatcaaaattttaattgtagcacatttctccccccattgttaacgccatttgttaggagttggctagattcaggttcagatcgggagggcgttgccaccgttacaaattggcaaacagaatcctttgagacaactttagggttaaggagtggtgcttttacagctcgcggtaattcaaactatttcccagattattttattcgtaatatttctggagttcctttagttgttagaaatgaagatttaagaagaccgttacactataatgaaataagaaatatagcaagtccttcaggaacacctggtggagcacgagcttatatggtatctgtgcataacagaaaaaataatatccatgctgttcatgaaaatggttctatgattcatttagcgccaaatgactatacaggatttactatttcgccgatacatgcaactcaagtgaataatcaaacacgaacatttatttctgaaaaatttggaaatcaaggtgattctttaaggtttgaacaaaacaacacgacagctcgttatacgcttagagggaatggaaatagttacaatctttatttaagagtatcttcaataggaaattcaactattcgagttactataaacggtagagtttatactgtttcaaatgttaataccactacaaataacgatggagttaatgataatggagctcgtttttcagatattaatatcggtaatgtagtagcaagtagtaattctgatgtaccattagatataaatgtaacattaaactccggtactcaatttgatcttatgaatattatgcttgtaccaactaatatttcaccactttattaaagtttgaggttcttatgtaaatataagtttatagtttttgatctatctactaaaattaagtatatataatgtatggatgttagaggttgtcttaaagtagttgaatgattactctgaggcaacctctttatttttattcttaggaattcacaaatagtaaaatgatatttcagctatacaaaaaaataaccatagataacataaaagttttcaaaaatacaattaaaaggaatgagataataaaaatacttaaatttaaagaaataacattgcatactattattaattttttgtgacattattaaacctcggtactgtttccaaatgaaaatatgagtatttatgtcaaaattgcaatatatttataatcataatatatgtttgtgaattaataaactaattattttatgtgttttatgtttaatttagtgaaaattagcttttaaatacttatatatatatgattatcattaaggaaaaacaaaatgatttcttagtaggacactattatgagctaaattaataaaagttatttagtaaaataattatgtgtaagatagggggaagaatataaggtgaattttaacaaaaatattattaaatatggatatggattttagcgataactgtagaaatagaaaattttacagtgaaataactacttacatttatgaaacaaagggaggactgagttcttaatatagggaaataatctcagtatttagttcaattctatgttaataatctaggggaaatagcttacttcgtattgaaattaatgtgaacgtgtaagattttaaatccaaaaatttatatggtccattgccagtgggccccaaaataattattaatatcacactttgtgttagacaaggtgatttagaggatgtaaccaattttgaaaaactgttaattttatgggaattcgtaaaatatattctaatacaataacatatgttacaaaaatgaaattgcgatagcgagcgaagtacatggtaaaattggtacaccattcctagagaatgggagcgtaactttaaatgcaaaatgtaattctacaaacactttgacgtacaaaaaccatggaattttagattatgtggaaacggtttaatctattattatgctcccgcatactattgcctatataacggtattattagatgtgaaaatcaaagagggagtcttcactcataacttggagaatgattacccttagttcaatataaggtaatgaataaaagcaggcaaagttagacatattggagatattcataaattcaaagctcttctataattactgatgatccagactactattcagctaaccgaggatggaattttttaatgagaatactgtaacattttaaatgtgttatttgaatatacggacataaaattagaagggtttttttgaaaaagtttaactataaaacccaatatattatcacttgagcagaaatctacaaaaaaatggattaatttaataatgtgcatacctcaagtttaatttataaaatacacttgaggtatgtatccatatagttctttaaactattaatatgcttatttattatatagaatgtcttccgaatgaaacagcaaacacgaaaataatattatagcatcaatattaaaagtaacttttttggatatatatgagcagttgatttcaacaaagactttttccgttactatatagaaacccatatttatgttgatagcataaagactattgaagggagcttgctttagatcaattttataacggatcgagtaagaaaccttgatagacacatcaagaaaaataaaatttttcttatgaattaaaataaaaacagttcgaaatatatacccgaattacaattatatttattgaatctaattcttaataacttattataacaatggagtgaatttgattgtcatttataaaaaatagtaagataggcactaaattaaacggattgataacgatatctatcgtcgcttgtataaccctttccacaataggttttttttgtttagcagaaagtaagaatgcttcaactaacatgtacgaaaataatttattgtcaatccaacatattggatctgtagaagcgaatattttccatgttaatatgaatttaatggagatgatgatatcaaaagatgaaaaaagaagtaaagaattactggcggagatcaacgatgctcgaaaagaaaatgataagttattaaaacaatttgagtctaaaattagttctaacaaagaattaaaattgtataaagatttttacggattatttgatgaattaagaatacaaataaaaaaaatacaagatataaacttatccaataatgaagacttatttacatattatttaaaagagattgaaccaaatattaaaaaggcaatagaatctatccaggaacttattagatataacaaaaataatgcacaacagttacagaaatctaatatcagcagtataaaaaatacaatgacattgtttattagcatatcagttttagcaataataattgttactttaatcggttattttattaaacgtgcaatcaagcaaccaatcatattattacaacaagacatggaaaaagtatctgcaggtaatttaacaatacgcacttcttatgaatctaataatgaattaggacatatagtacactcttttaacaatatgttagataatctacaacaactaataggaaatgtaaagagtacagccaacgaggttatttcttctacagaaggtatgttaaaaaacacaaaaaaagcatcttatctatcaaatgaagttgttcaaaatatttctgaagtaaataccaaaatagaaggacaatttataagtatccaagagaattcatcatcattaaaagaaattgctaccggagttcaaactatcgctgaatcatcaaaaatggttactgaaatgtccgttgaaacaactgaacatgtaaattcaggcagtgaagaaataaaacaatccatccttcaaatgaatagtgtacatgcagtagttgaagaaacctctatagtaatagatacacttgttacacgcacgcagcaaattgataaagccctagatgcaattactaatattgcagaccaaactaatcttttagcattaaacgctgcaattgaagctgcacgtgctggtgaaaatgggaaaggatttgcagtggttgcagaagaagtaagggatttggcagaaaaatctaaagagttcgctaatgaaataaatcatttaatcaaaaatattctacaagatacaaaagctacagttgatgtaatgcaaagggggaaacaaaaagcaatagaaggaaaagaagccgctcagaaggcaaaccaagtattcttttctgttgtaaaggatattgataagatttctagtcaaatgcaagaggtatgtgcagcaacagaagaaatgtctgctggaacagatgaagtgaatatatcattgtcaacagtttctaaaacagcagcacaagtagctaatgggacaagtcatgctgcacagtcaatccaagaacaggcaatctcaattgaggatattgccaatcaatctaacaaagtaaagggaaaagtagaagaattggtacagttagtttcacaattcactatagagggacatggaaagaaggattaaattatataacgtaactttcacttgacttagtaaaacatgtattggtgcaaaaaatggttctattgtgaatttttaagagataaaatttaggtatgattgctagtgatttttgcaatttatcatacgtagaaaaaacgaagtttggtctttataaacttcgtttttttttatatagaatgaacggtttaaatgccctttaaggaaagtgaagcatgacgaatactttaaaatcctaagaattttgcaacacgtctttttatatttctatgccaatggtcttgctcgatgttcgcgttcctttcgaaattggaagcctagtgtatgaccattattaccaattggacaatctaaaagctacattctctgttttcctttatataggaccttttaatttctaaaatgataattgtataaaaagaattaatgttatttaagatgttgaaatattgttaaatctacaattttagcgttacttaaaaataaattatattaagcaacattatttggtgtctttaaagttttttgattattgaatgatattaagtataaaaacagaaagaagggatgaatttggataataactccttgttaatagtatgctttaaaaatcatgaaaactaaaattgtagtatttttctccataacatccataatttttttcatagtattcacttatgtatataatcagaaattacctaatcataagtatccacaatggggtgaatttctaaaatatatttcttaaacaagatagaggagtaagtttaagacggatattaaattaattgaaattggacatatttagagtatagaaaaactgctgaggaggaaattatatgaatattcgagaaagtgaattgccgggcatcggttataaatttcatattgtcacaaaagataataataaaatggtaatcgtgattcatgatgatggacgtagagaaatgtatcattttgatacagaccacgaagaaagtatctcaagtgtctctttgtgtgattcagaggcaagaaagctcgcagcaatattaggaggaatggtatataaacctcaagctttagaaacaattgaaatggcatttgaaggaataacaattgaatggtttaaagttgaaaataaagctcttgccattgaaaaaacaataggtcagcttgaaataagaaaaatatacaatgtaactgttatagccattataagagaaaacatgaaaaaattatttaacccaggaccagaatctgttatcgagaagggggatatgttagtagtctctggagaaagaaacgaagttaaaaaacttattaatgaattactttcaaatagaggagactgactagatggatactttaatttttgaagttggtacagctctaattttagtagcaattgcagcagtagtcgctggaaggcttaaattttcaattattccttttttaattgttctggggatgttagttggcccacacgctccggtaataggtgtaatcgattttagatttatagaaagtgaaagtgtaatctctttcttgggaaggataggagtactttttcttctattttacctaggattagaattttcaatgaaaaagctaattaaatctggtcgttctatcgcgattggtggaacaatctatattttgattaatttttcgttggggttactatatggatttttgatgagattccctttattagaaactttgattatagcgggggttattacaatttcttctagtgctattgttgcaaaagtactagttgatttaaaaagaacagggaataaagaaacggagctaattttaggaattatcatgtttgaagatatattccttgctgtatatttatcagtggtttctggcttagtccttggtgatcatgcttcattcttaggtgctcttacctcaattggtatagctttgggatatatgctcttattctttattgtagctagatgggctactccgttattaaataaattgttgaatattagttcagatgaaatttttattatagtagtattttcttctttattctttatcgctggtttttctgaaacaattcatgttgcggaagcaatcggagcgcttctgttaggtttagttttttctgaaacagagcatagtgatcgaattgaacatcttgttgtttcatttagagacttttttggagctatcttcttctttagcttcggtttaggtatagatccgttttcgttgggtggagctatatggctaacgttaggtgctgtactactgacaatcatcgggaactttgtagcagggatgattgcaggaaggcaagctggattatctcataaagcatcgacaaatattgggttaacaatcgtgtcaaggggggagttttcaattattatggctaatattggtatggcgggtggtttaatgtcagtattgaaaccgttctcagcactatatgtacttatcctatctattttagggccactctttactaaagaatcgagaaaaatatataaatttttaaataaaatatttaagtgggataaaaaatctgcttaaatttagggaaataaaatctttttaattacttgcatttttattgtagagtttctgtagtttgcatgaattgagggattgaattccttgtgttaattaacatatatatcgatttgaaataaaaaaggagctaaaaggatttaatcaactgttagctccttttagctcctttttaggtatatcgaaaaaaaatcaaatcatacatcacgaaaagaagtttttaagaaccattcctaaaatttcaaggcattttagatgttttatgtggaaaagcatggttaacttcatcaataggtgaaaatatctatgcttttttatttcaggacagagatatactgtactcataaatatagaaatatgtatttaagaaagattgaaagcgtattaaataatctgataggagatgtagctatatgacagtattcaatgttaaagaaattaataaaataccttttgaaagtaatatcattccaaaaggaaaccgtaaccgtcctgcatataccatgaatccaagatatatcacaattcacaccactgcaaaccaaaatgcaggtgcagatgcaagagcgcatgctagatatgttaacaatggtggtggatcatctggtgtatcctggcattttacggtagacgatcatcggattgtacagcacttaccactaaatgagaatggttggcatgccggagacggtcacgggtttataggtaaatccctttcctaaaaaacctaactttatcatacgaggaggtgcggtaatatgaaacgatttataagtacggaaataaccaccacctgcatgacaaaaaagcagagtaaggtgatttatagatgtaacaattaaacttttaggaggagattagaagatgaataacgttataaatgttggggtattaggtttaggtacggtcggaagtggtgttgttcatattttgaaagaacattataaaaaaatcgcacttgatacaggatacgaagtgaaagtgaaaacagtcgttgtacgtgatttggaaaaagaacgcgatgtttgtattgatggaattgcagtaacaagtcatgcagatgaagttctaaatgattcaaatattgatattgtagtagaggtaatgggcggaattgaagaagcaaaacagcatattgttaaggctttacgaaataaaaaacatgtcgtaacagcaaataaagatttaatggctgtatatggtgcagagcttcttcaactggcgaacgataatgattgtgatttatgttacgaagcgagtgtagcgggcggtattccagtgttaagaggactaactgatgggttagcatcagatcaaattgaaaaaataatgggaattgtaaatggtacaacaaattatatgttaacaaaaatgagtcaaaatggatggtcttatgaagaggctttacaggaagcacaaaaattaggctttgcagaatcggatccgacagcagatgtagatggactagatgcggcgagaaaagtagcaattcttgcaaacttaggtttttcgatgaatgtttcattagatgatgtgcaagtaagagggattcgaaaggtcgaaaaagaagatttacaaatggctgaaaagttaggatttactatgaagttaattggtaaagctgaaaaacaaggaccagccattcatttaagtgtagaaccgacgcttttaccgagccagcatccattatcaaatgtgaataatgaatttaatgcggtgtatgtccatggccaagcggtaggagaagtgatgttttatggacccggagctgggaagttaccgactggttctgctgtagtaagtgatattatttcaatcgttaaaaatatgaatcaagttccgaaaaataaaagtgcgttaaaagaaccagttccttatgaattacaaggtgatgaagaagtagtttcgaaatatttcttacgcatttcattacaagatgagcctgggatgttacaaaaaataacagaatgtttcgttaattattctgtaagtttaaaagaggttattcaattacctttaaaccgtgaactggcagaagtcgttgttgtgacacatcgaacttccaagtatcaatttgaacgagttttagaagcgatagaagctgtcgcaagtgaaataaacagttactacattattgaggaggaaaaacaatatgtataaaggactattaaaacaatatgcgtcttatttaccggtgaatgaaaatacacctgatgtcagcttaatggaaggaaacacaccacttattccattattaaatatatcaaaacaattagggattcagctatatggtaagtacgaaggagcgaatccgacaggttcttttaaagatcgtggtatggtcatggcagttgctaaggcgaaagaagaaggttcagaagcaatcatttgtgcatcaacaggtaatacatcagcgtcagctgcagcatatgcggcacgtcttgggatgaaatgcattatcgtaataccagaaggaaagattgcacatggaaaattagcgcaagcggtcgcttatggagctgaaattatttcaatagaagggaatttcgatgatgcgcttaaggctgtaagaaatattgctgcagaagagccgattacgttagtaaactcagtaaatccttatcgaattgaagggcaaaaaacagcagcgtttgaaatttgtgaccaattgcaaaatgcaccagatgttctagctatccctgttgggaatgcagggaatattacagcgtattggaaaggcttctgtgaatatgagaaagaaaaaggttataaaaagccaagaattcatggctttgaagcggaaggagcagctgcaattgtaaaagggcatgtaattgaagagcctgaaacaattgcaacagcgattcgcatcggtaacccagcaagttggtcgtatgcagtagaggctgccgagcagtctcgtggtgaaatagatatggtatcagatgaagaaattttacatgcgtataggttattagcaaaaactgaaggagttttcgctgaaccaggatcaaatgcttcattagccggcgtaattaaacatgttcaatctgggaaaatcaaaaagggagaaacagttgttgcggtattaactggaaatggtttgaaggatcctgatatcgctatttcttcaaatcaactagacatcgcaagtgtgtcaaatgatatagaacaaattaaagatcatattaaaggggtgattatgtcgtgataccatttagcgttcgtgtccctgctagtacggcgaatgttggtcctggatttgattcagttggaatagctttgtcattgtatttaggtgtggtggttaaagaaaaagctgataaatggcaagtaatccattcctttgaagaatcaataccgacagacgataaaaatttaatcgttagcacggcatgtaaagtatgtccttctatatcaccccatataatagaagttactagtaatatcccattaacgagagggctaggaagtagtgcatcagcgattgtagctgggatagagcttgcgaatcaactaggcaatttgaacttaactgctgatcaaaaagttcaaattgctacaaattttgaaggacatcctgataatgttgctgcttctatattaggtggaactgtaattggagcacttgatggaaaggatgtttccgtcgtaagaattgagagcaaggaattgggggtaatttctctcattccgaatgcagaattaaatacagatgaaagtcgatctgtattaccaaagatgtttccgtttcatgaggcagttaaagctagtgcgataagtaacgtattagtagctgcattatgtcaaaagcggtgggaagttgtaggtgaaatgatggagagagaccattttcacgaaccatatcgtttagaactcgtaccattattaccatctattcgtaaatgcgcaaaagaatttggtgcgtacggcacagcacttagtggtgcggggccatctatttttatattaacgccatatgagaagcgtcaagaaatcgctgagcaattagcgagagtatttacagatatgaaagtatgtgagcttgaaatcgaccataaaggtattattgtaaataaggaagagcatattggatcgtaaagaaagctggcatggctagctttctttacgttgcaaacctattttaaattaggttttttcggaaaaatataaaacaaatgttgattttgaataatgtaagtaaagagtgcattcattttggaggtgattaaatgaataaagagtcaccagaagaaaaaagagagcgtatgagacaaagtgaattaaaaagtaatcctacgggttctttacgtgacggactcaatagagcggaaacgggtagtccagttgatatagcaggcggtatgaatcggaaaggtacaggaataatcattttagtactacttttaggatatattgtatacacttattttttcagttgaagaatgcttgttaaaattttgatttgtttagtttcataattgttgagaaaaaatgtagttactgtattacatattttctaagcgaattatagttgttcatatcaacttttaatactccaaacagagctagcaaaatgctagctctattattttttgccacattcctgtaacaaagcatctgtatattcattggtggaggtgcagaggatgaaaaaaatgatagcgatatgtcttcttacaactatgtcgttttcgactttagtcggttgtgacgtaaaaggtagtaatgctgtacaagagtctaaaataaagaaagcgacgtataaagattttacttatgatgtaaatccagaaacattcacattaactgtagaacatgagggggcaaaggaacaggcatcacaacccctaccgaaaatgaaggtatcgaatgtaaaaaaagaaaaggatcgtacatcgtgggaatatccagatcaaaaagtaaaaataaaattagaaaagaaaaaagaccacttaaacattgaagtggaatcgactggtgcagaaagctttacatggccgaaagtagaagctgaaaattatacacttccgttatgggagggtaagcaaattccgagcaatgatgagaattggaagaagtttttaaaggatgatgcatattcatttgctgaatcattttctatgaagtttttcgcattaaatggttcgagatattcaattgtatatattgcaacgaatatgtttaataatgaattgaaatttcattcggatccgaaaataggatttgattttacacatgaatttccgagcataaataaaaataaaacatatggatttcaattatatgtgacaaataatgatgcggtaagcattgctaaactgtataaggatgatattgttcgaaaaggtgaatttaaaacattacaagaaaaggctagaaaaaataaagaaatcgaaaagttatatggagcggcgcatttttatttttggaatcaaaatggtttattagaaaataatataaattggccaaaactaagggagcaaataaatagcccgctgtttagtcatataaaagaacttattcaaaagaatagttccgagcctggggaactgaatgtattggatcaagtaagtaaacaagatttcattgataagtatcaaaaaaatgttattttacgttatataaacgaagtattatcgatgaaggaattttataaagaggatatttttcaaaacgttaatcaggaagctagtgtgctattaaagaaaggtgtaggtcacttaacgaatacagaattgtatagcttaaataagcatttattaaagtcgctacttggtgatgcggttgaagaggtaagtaaatggggtaatgcagatggaacggatatattaaaggaaatgaaagaggcaggaatagaaaaagcgtggattggtctgccgaactgggaacaaggatttatgcaacctaatttcgtgacaaaagctaaggaaatggggtatttagttggtccgtatgattcgtatcattccattcacgaaaaaagtgataaaaattggaacacagcatcctttaatgacccgtcattatacgaagaggctactgtaacgaagaaaaacggagaaaaggtgcaaggctttttaggaagaggtcgcaagttaaatccgactttatcgctgcctagtgtaaaggaacgcatgaatgatatattacaaaatggtcctaaatataattcatggtttattgattgtgatgcgacaggtgaaatttacgatgactattcagcgaaacatataacgacacaagagcaagatttaaaagcacgtttaaaacgaatggactacattgcgcaagaaaagggtatggtcgttggttctgaaggcggaaatgattttgctagtagtacgattgcatttgcacacggaattgaaacacctgttattaaatgggacgatgaagatatgcggaaaaataaaacaagtccgtattatgtcggtggatattggtcaccaaatcaaaatgtgcctgaaaaatatgcaaaacaagtaccattgaaagaagaatataaacaagtatatttaaacccagtatattcggtaccattatataaattagtatacaatgattccgttattacaacgcatcattgggaatggggaagtttaaaggtaaaagatgaagttggaaatcgaatgctgtctgaattattgtataatgttcctccgttgtaccatttagatgaagtagagtggaataagcataaaaaagaaattacagagcatctaaaagtttggaatgaagttcatgaaaaagcagtaaaagaagagatgacgaattttgcgtatttgtcagaagataagctagtacaatctgtttcttatggaaaagatattaaaatcattgtgaacttctcaaatgaagacatggaagtagaaaaaacgaaaataaaagcaaagtcggcttacattgataatcaggggaagaaaagtgtgtatacgccgtttgagaaataataaagttaaatatactgtattcatagagattttataattagctggattctttattcatatcgtttgttaggaaaaagacattctaatttaaaatgaaagagttaataaatttgtaaatccgtatgttgcgaagtgctaaatttttgaaattggtaaatagtgacttgccaaaaataagtacgagagtataatgtgaaatggaatacgtattgggtttaagtagtaaccttacaaaattgtaaggttagtgaaaggaaattcaatatgaagataaatagacttacattatacttggtaaagagaaagagaggcgaatgggtatgagctctgaattagaacaaaatacgagaagtaataaaaagcgttctaaaagaaagtcaatgaaatggttcatattaattccatttttcctacttatttttggaggagtaggatatggttcgtttatatataataaagcaaaagctgttgtaaatgatgcgtatgcaaaaattgataagtcatcaaagcgtgataaagaagttgaacctttaaaggataatatttcaatattaatcatgggtgtagatggaagtgaaatgagaaaaagccaatatggcgaagcagttcgaacagatgcacttttattagcaacaattaataaagatgataagtctgttaagctagtaagtattccacgtgattcacgtgtttacattccaactagaaaaaaactagataaaattactcatgctcacgtatttggtggcgtagaaagcacacgtgatacggtggaaagatttttaaatgtccctgttgattattatgtgaagtttaactttgaatcattcgtacaaattgtcgattcaattggtggtattgatattgatgtaccagttactttcactgaacaagatagtaaagaccaagctggtatgatccatttagaaaaaggttaccaacatttaaatggagaacaagcacttgcacttgcaagaacgcgtaaaattgatagtgacgcaatgcgtggacagagacagcaacttgtaatagaagcaattgctaaaaaagcgatgtctgttcaatcaattagcaaaatgggctctttactggatgcggttgataaaaacatgaaaacgaacttaacatttgacgatatgcttgctattacaaaaaatatggcaggatctaatttggaaatggaaaaaatgcaaatagaaggtacagataaacgtatcggtggtatttattattacattccaaatgaaaaaaatgtaaaagacatttccaaaaaattaaatgatcatttaggtgtaacgccaaaatcagtccgaaacgaataataaaaaaagattggcttttgccaatctttttttatgggaatgtatttgtaacttttctgtaacgattttttagtttagaaaaattatactcatatgtatgagtataatggataggtaaaaaagtaaaaggacatattcaaaatttgtggtaaggaaagatatcatatgcagaaatggttaagcatgatgggaattatctttatattgactggatgtaaaatgtctgaggctccaacaagtctaatggaagctcctacaaatgaaaaatggattaatgaattaaaggaacaaattgataaagatttacctgttaattatcgcttacttactccaatgtctaacaaagataaacagatgatttggtcaatgaattttaaacaagataataagaaagaagccatcttattttataaattgccgaatgaagatcatagcgtatatttagccgtatatgaagaaatcggaaatggctggagaataaagtccacacataaatttgatggtggagatgtagatatcgttgaagtcggtgattttacagggaacgggaagagagagttgttaatcggaatctctgtaaatcgtgaatcgttagaacatgttatgtatgttttttcggaagaaaatgaagatatgaaggaaatatataatcgaagttatacgaagttattcatagaggatctaaatgaaaatggactgaaagatataagccttgttacatttgaaaaagatgagaagctgacagttgagttcatggaacaatttaagactttatctgaagtgtcatacgatccatttataaatagtattcaaagaatacaaatgggtcgtatatctaaatcactaaaggcggtggtaattgatgcaggagttggcgctcattcaggtataacttatgtagcaaaatttgatcaggatcattatgaagtattacctatagatgggaaagaagatttatttaatgaatatgttgtagaaagtaaagatgttaatgaagacggcattattgaatttgttcgtactgtacgtccaaaaggttgggaagataaatcacatggtgatagtccgctttttgaacgttacatacagtggagtgaatctggaattaaaccaattgaagaacgatatatagatatagaaaaagggtattatgtgaaaattcctaaagagttaatagggaaaattacaataccagatcagcaaaaagaatcaaattctcaaaagtttttggatacaagaacaaatgaaatatggcttgaagttcatatttttaagcggaaagaatggttcaatataaaaggctacagcgcagcaattaaaacagcttctcacgtatatgcagtaccgaagcaatcgaaatttgaaaaagtgaaagcatatataaaaccgctagcggattatcaacaagagtaggaggtgggaattatgtcaaaaattttagttttagaagatgaattaacaatccgtagctttattgttttaaatttaaaacgtgctggattttatgtaatagaagctactactggagaagaagcgttacagattttgagtgaacaaactgttgatatagcactgctggatgtaatgttaccggggattgatggtttagaagtttgtaaggctatcaggaaagaaaataaaaaaatgggtattattatgttaaccgcacgtgtacaagatgaagataaggtgcaaggactaggaataggtgcagatgattatattgcaaaaccgtttagtccagtagtattaactgcacgtatacagtctttattaagaagaatagaagtacatgaagaaaaaacgaatattgttacgtcaggtccattttcgttaaatattatagaagaaagattgtataaagatggacaattagtcgatttaacacctacagagtatatgatattacagtatttaatgaatcaggcttcaaagccagtttcgcgtgatgaaattttaaatatgatttggggaactaattacgtaggtgaaacgaaagtagtagatgtaaatatgagacggttacgtcaaaaaatagaatgtaatccatcagaacctgaatttattcttacggtgtggggaaaaggatatgtgtggaaggaaagtataagatgaaacggaaagtgactctatattttatgacggtcattacacttatgcttgtattatttgaagttgtattttcagtctcaatttatcgatactattataatggtattgtgcaatatatagagtctcatgcgaaaacgagtacacgttttttttcagaatacaattcactatactttattcgattacaagaatatagtggtgacataattagtagctttcaattagaaggaacagaattacagttaattgatcgtcacggctcggttatacaatcttcaagtggtgaaaaggtagaaggtaaagtgaatattccacaatcattattagaaggtgaaatgtataatcaagttactacgaaaggtaataaaaaacaactagaggtgctaagcccacttatacatcaaggacaaactattggtgttttaaaatacacgactgttttaacaaatgtaaataaaaagattattgaaattattacgtttactatttctgtaggtattgttatttcgggagttgccttcttaattagtagacgtttggcaaattcatttgttgagccaattgaatccattattcaagcctcttcacaaattgcagaaggcacattaaagcaaaaaattaaagaagattatcctggagaattaggtgacttggcacatagtttaaattatatggcctataaaatagataaggctgagcagatgaaaaatgaattcattgcttctatttcgcacgaaatacgaacgcctttaacaggaattaaaggttggagtgagacgttaaaaacagtagatcatttaacagaagaagaaataaagcaaggtatgggcattatttcaggtgagacagataggttaattcatttagtagaagaattgctagatttttcaagattacaatcaaatcattttaatttatataaacaaaaggtgcaattgtacgatatactagaggagacgatttggcaattaactcctaaatcggaagagaaggaaattcaatttattactactatagaccgaattgaattgatgggagatcgaaataggctaaagcaagttttcttgaatattgttcaaaatgcaattaagtattcacatgaaaaaagcacaatacacattgaagcgactaaaatagaaggacaagcagtgattaaggtaagagacgaaggtattggaattgctaaagaacatttaccatatattgagcaatcattttaccaaattaataatcatgctgcaggtgcaggtattggtttagctatcgttaaaaaaatggtagagcttcatggcggtgcgcttagtgttacaagcaaagaaggaataggaacaacaattttgataaaactcccattataatacaaataaaatctatttatatggtgaaataaaaataaatagatgtataattatattgggcgatttatatataagattaatagggagaggaattcgatagaatggaaaaagctttaaaaattaaacaaatagtagtcgttttaatagcgattgccgcagtagctattgggtattacatgtttcaatcaattacttcaccagcaaaagctgttgcgaaacaagaaaatgtagtgcagcttgcaagtgaacagccgaaagttgaaatgaataaaacggcaccaagtcgttttaatggaaaagaaagaaaagttgcttatcttacatttgacgatgggccagggaaatatacggctgaattattaaatacgctaaaacaacatgatgcgaaggcgacgttctttttaattggagcgaatgtaaaagaatttcctgatttagtgaaacgtgaaaatgctgagggtcattatgtaggcatgcatagtatgacacataatttcgcaaagttatataaaaatggcgagtatgtaaatgagatgaaagaagatcaaggtttaatcgctaatattattgggaaatcacctaaattaacacgtcctccatatggttcgatgcctggattaaatgaaggtcttcgaaataaagtggtagaaggcggatttaaagtatgggattggacaattgattcattagattggaaatacaataaaatgccagttgatgcagctgcagcacaaattgctcaaaatgtattaacaaacgcaacaaaaccacaagaagtaattttaatgcatgatattcacccgcaatcagttgctgctgtgccagcaattttaaaagggctaaaagaaaaaggttatgagttcgaagcttatcatgaagaaagtcacttcccagtgaacttctggcatgataaccgtatgtaatggaggaatgaacgttgaagtatggaaaagtagcagtagttggagcattatcagtaggacttttaacaggttgtttcggtgaaaagccagaagaaaatctatatacagcttttgaaacagcagcaacacaagaaaaatctttagtggatgaagcaaaaaaattagagcagttagagaaacaagggcaagaattatatgctcaaattttgcaagaaggtaaagatcataatgaagcagttgtgaagaaaatagagcaagctactgcaaatgtagatgatcgtgaaaaagtattgaaaagtgagaaagaaatgctagaaaaagcacagaaggaaacgaaatctgttcaaagtaatatagagaagattgaagataagaagttacaaaaacaagcaaaagcagtagaagagtcgtataagaatcgttatgatgcattccaaaagatgaatgaaaattacacgaaagtgttagcgactgaaaaagaactgtatgaaaaattaaaagtaaaagaaacgaaattaaaagaaatcggtgaaaaagttaaaactgttaatgaattaaatgtggaagcacaaaagtcgaaagagcagtttaacaaatttacaaaagagtataatgacagtaaattagcattctacaaagatgcagaaattaagattaaagatcagaaataaagaagaatctaaagtgtaataaaaagccggagaaacatcgttataaatgttttttcggttttttacgttaaatgaatagaaaagactggaattgatatcataaaagagttatagtgagttattctaagggaaacattgtaaagtaaggagaatgggaatatgtcatatgaatttttactcaaattaggtttagcactctttttaggattattcatcgggatagataggcagctaaagaataaaccactgggtgtgaaaacaagtatggttatttctgtagcaagttgtttaattacgatggtttcaattgaatctgtgcatgtatattctgttccaggacatacaaatatggatccgatgcgactggccgctcaaattgttagtggaattggttttcttggcgcaggtgtcattttacgaagaagtaatgacgttatttctggattaacaacagcttctatggtgtgggctgcttcagctttagggatcgcaattggtgcaggattttatttacaagcgacagttgctatggttttaattattttagcgattaatgtacttccgcaacttgtgaaaattgcaggaccgtattcattaagacaaaaggatttatctataaaaattactgttaaagagcatcatgagttagatggtatatttaagcaaattaaaaatttaggcatgcatgtgaaacgcgtgaaaattaaagatatagatagtggagcatttcagcaactggagatggttattttagctccagaagatttatatacaacagagttatatagttccctgaaagagattgatcgagtagtttcagttgaagtggaaagtagataattgtgataaaaaagagtgaagtgaattcactcttttttatttggatttttaaggaatgaaattgatataatgatgagtaataaggggggagaaatgatgggaatacatattagaagagcaataaaggatgatataccaggtatagcaaaggtgcatgttgatagttggaagacagcgtataaagggatatttgctgacgaaattctagataatatagcatatgagaaacgagaaaaacaatgggaagatatttttcaaaaagaaggtaatcatcaatttagatttgtagcagagaatttaaatggagaaatagttggattcatcgatgggggagtagaaagaactggtacatataattgtgatggagaattatatgcaatctaccttttacaacagtatcaaggaatgaaaataggacaaaagttatttcaagctttattatcggattgtataaacaatgatatgcaatcacttttagtttgggttgttacgaataatccttctaaaaagttttatgaaaaatttacccctgaaaaaattgatacgaaatttttagagagagtaagggtagaagaaacagcgtattgttggagagatttaaatttgttacaaaaacaaacagctatatagaattatacatataataatattatgtaaacatattatagggaaaggtatacctcatttggtgtacctttttattaatccatcaaaaaatggattaataaaaaatagtaggtaattagtttgaaagcaagaaattttctagtgtacttttaactagattaaagaaaagaaagaaaaaaataaaaatttaatttgataaaaaaattctgaaatatactcttgaattgaatatcattatcaattataatatgaaattccgatagcgttaatataaagaggaggaactaacagtaagtgaaaacataagtaaacgtggatatgcgtaatgaaaaatataagctcgatgactgcatggagagaaatgtttcaaccatcaccatcgcacacaaagatagggttttccgttttgattatgattggtttgatggatttcttcataagttgggagtcaaagttatcattgttactaatgaaaggttgtctccacaagaagagtttgcttagtatttgatatctgttattcacatatttagttgtaggatatacagattgaggaaatacaaaaagagaatgtcggaggatgaagatctatgaaaaaagcatatctaatagagattaagccgacaaatgaacaaataaccaagatccatcaaacgattggagtgtgcaggtatgtttacaatctatatctttcaaaaaacaaagagatatatgaatccgaggggaaatttcttagtggctatgaattttctaaatggctaaacaacattcatacaaaagaatgtgaccagtggataaaagaaatatcaagtaaagctgtaaaacaagcgattatgaacggagataaagcttttaagcgattttttaaaggtttatctaagtttccacgctacaagaaaaagaaaaatgaagatgtaaaatgttatttccctaaaaacaacaaaacagattggatagttgaaagacatagagtaaaaatccctacgattggatggatgagattaaaagagtatggatatatttcaaaagatgcggttgtaaaaagcggaacgatagctaaaagagcaggaaaatattttgtatctgtgctttgtgaattggaagaaacaaaagcgaagccaacactccattcaacgggtgtaggcattgatttaggcgtgaaagatttcgctgtacgtagcgatgggaaaattcacaaaaatataaacaaaacaggaaaagtaaaaaagatagaaaagcggttaaaacgtgaacaacgctctttatcacgtaaatttgaaaatctaaaaaagagaggtgaacactctgttactaataaaagagcgaatatagataaaaacattcttagggtgcaaaaactacatgccaagttagcaaacattcgattagcgtatgtaaagtctgttgtaaatggtgtggtgaaaaccaagccaacgtttattacagtagaagatttgaatgtgaaaggtatgatgaagaataaacatctatctaaagcagttgctaagcagtacttttatacatttaaaacatggttattgacgaagtgtgaggaatatggaattgaactgcgtcaagtagacaggttctattcatcttcaaagctatgttcatgttgtggtcaaaagaaagtagacttaaagctatccgaccgagtatatgaatgtgactgtggaaatgtaatggatagagatttgaacgcgtcaatcaaccttttacaagcaaaagaatatataatactaacgtaaatagattgtatatatgtacggtgggctacatcggaatttacgcctgtggagtgttacagcaaactgtagtagcgagtgattggcgagacaggacacgtagaagcaggaatactctaagaatgtacatttatctatatttttagtagcaggaccaacatgcagcatgcgaaacaaatcgcagaacatgcaacattacaaagctttttaaactgttatttaagagaaacagggagtggagaatggattacagaggatgaaagaatgaaaagtatcttcagtaatacgttgaatagagatacagtccccacatatttatgttgtcggctatcggcacagaacgttactttgtatggagaagttatatataaatcatcaacagatcgccatttgtttggagaacaattttattatcaaattggagatagtaattccgttattacagcagattacgttacagttattacgtttttaataaaagagatgtcgatcaactacggagaaggaacgaatcctgcggaacttatgcttcgagttatccgtagttgtcaaaatattgaggaatttacaaaagagagaatagaagatacatccgcattatacggtttccatacaacttttatagaagcggagcagtctttattatttgggcatttaactcatcctacaccaaagagtagacaggggatattggattggaaaagtgcaatgtattctccagaattaaaaggggaatgtcagcttcattattttcgggcacataaaagtatagtaaatgaaaaatcattattatcagattctacaacaacgattataaaagaagaattaagtaatgatgagatggttagtaaggaatttatagcgaagtactgtaaggaagatcaatatgcattaattccaattcatccgcttcaggcagaatggctcttgcatcaagcttacgtacaagattggataattcaagaattgcttgagtatattggtcctgtaggtaagtattatatggcaacatcatcactaaggacgctatatcatcccaattcgaagtatatgcttaagttttcatttccggtgaaagtaacgaattcaatgcgtattaataaactgaaagaacttgagagtggtcttgaagggaaggaaatgttaaatacggctattggtgaagtacgagaaagatttccaggatttgattttatttgtgatccagcctttattacattaaattatggaacacaagaatctggatttgaagtgattattcgtgagaatcctttttatagtgaacatgcaaacgacgcaacattaattgctgggctagttcaagacgctatacctggggagcgtacgcggttatcgaatattattcatcgcctagcagatttagaaagtaaaagctgtgaagaagtaagcttagagtggtttagacgatatatgaatatttctttaaagccaatggtatggatgtatttacagtatggtgttgcattagaagctcatcagcaaaatagcgttgttcagctaaaagatggttatccggtcaaatattatttccgtgataatcaaggattttatttctgtaattcaatgaaagagatgcttaataatgaattagctggtattggagaacgtactggaaatttatatgacgactatattgtggatgagagatttcgttactacttaattttcaatcatatgtttggcctcattaatggttttggcacagcaggattaattaaggaggaaattcttctctcggaattaaggtctgtacttgaatcattccttccatataaccgggaaccttctacatttttaagagaattattggacgaagataagttagcgtgtaaagcaaatttactaacgagatttttcgatgtcgatgagttaagtaatccattggagcaagctatttatgtgcaagtacataatccactcgttagagaagtggctgttcgttcataaataacgttaaaatttcacgtaatacaaataatggtattttgtcataaggtggagggttttatgagagtggacatatatcatacgaaagtattgaaggcgctcgaatcagaagattacatttcagtacgaagaagagtgctacgtcaattagtagaatcgttaatttatgaggggattattacaccggttcgcatagaaaaagaagaacaacttctttttctaatacaaggacttgatgaagaaggcaaaagtgtcacgtacaaatgctatggcagggaacggatgacatttggacgtatttcgttagactcattaatagtaagagttcaagatgaacagcaagaaatacaatctgtctcgcaatttctagaagaagtttttcgggttactagtgtagaacaagctaaattagattcttttatacacgaattagaacaaacaatatttaaagacacgattgcacaatatgaaagaaataataagagagaatatactcaaaaatcttacgatgagttcgaaagccatttaatagacggccatccatatcatcctagttataaagcacgtgttggatttcaatatcgtgacaattttcaatatggttatgaatttatgcagccaataaaactcatatggattgcagcgcataagaattatgcgactgtaggttatgtgtaaatgtcaagataaacatgtacattttcgcttgtttaagcatgtacaaaatcttagtttgtctagcatctaaaataaaaattgacgtttcacgttgtttgtttcgttcagttttcaaagaactacttagccgctcatttgcgacttccttatgttaacactttcgttatttgatgtcaactaagtttttcatttcgtttgtcgcttgcgacgttattgtcatcggcgacttgttctatattacacctctaagctctaatcgtcaatatgtttttataaaaaatataaaaaggcttatttcttttaaaataagcctttttatcacatatcattctattcatttattatttttctataattggtaacgaaacgataaattgaataataccatccctatattccgctcgaatactaccaccttgtaactcaacaatacttttcgcaatcgctaaaccgagtcccgacccttccgttactctacttcgagattgatccttcttatagaaacgttcaaacaaattcgctaactcttctctcgtaaactcttcactatgattcgcaattacaatttgtatatccctacgctgcctttgaagagaaacttttatatctgcatcatctttactatacttaatcgcattcattagtaaattatcaaatacacgaaccatcttttccgaatcaatcgatgcataagcacgttcctcaggaaacttcttaacaaacgtaagtccatgttcttccgcctgcggtactaactcttctattaattgctcgagtagctcattcatacaaacttcctgtttttctaatacaacttgttcatttgttaacttcgtatactcaaataaatcttctattaaattttttaactgctccgactttgcaaaagcaattctcgtatactcatcgtgttgttctttattttcatatttagaatctcgaagtaatcgtaagtagcccataatagaagtcagcggtgtgcgtaaatcgtgagatacattcgtaataagctcattcttttgcttctctaatttacgttccttttctatattattcataagctcttctgccatattattaatattctcagttaaagctgcaatctcatcttcaccttttttctcaatgcggtacgctaagttgcctctttctatttcctttacaccttgtgccattgcttcaatctgcttcatctttctctttgttatatagaagaaagagaaaatgaatacaagaacaccaattaaaaacgggaatggcccttctttcgtgtcatacattacctctccctctggaattccgctaacaaacatgtacaaattctttccttcaatagtaataggtgaaaaagatataaactcttttcttgtactttcaaatacatttctaccatctgtataattaatcgcaaatgatgctgcattacgaatcgtattatgcaaatcgatttgctcttcttgcgcttgctttgttttatataaaactttaccactttcatcagtaaccaatatctttaaagctctagacccttgctctaaattttggttctccatttcgatcatatttgatatagcttctaatttattttcatgaaccgaactatttgccgctccttgagcttggtgattaatttgttccataccagcccgataatcgatagttgcttgacgattcgcattctcaaaaaatggcgcagctcccttcgctgacaaaactcctaataacgcacaagcagcaaaagtagtaatcaattgaatccttatactctttcgtacgctctttactaatttctcaattaattctcttattttccttatataagtaaacggattaaatatctttttcaatcttataccccactccccatactgtttttatatatctaggtttccttggattctcctcaatcttttcacgcactttccgaatgtgcaccattacagtattatcagactggaaagatcgttcgttccacaccttttcataaatttgctccgcactaaacaccatacctggatttctagctagcaattctaaaattgaaaattccctcggagttagtttcacttcttctccctctacaacaactttatgggtcgagatgttgattttcatctccccaatttctaactcgtcctcattttggacagcgaaaccattcattttcatataacggcgtaactgagatttaattcgtgcaattaactctaatggattaaagggcttcgttacgtaatcatctgcccctgttgttaatcctaaaatcttatccatatcttgcgttttggcagaaagcataataataggcatttctttcgcttcccttaccttcatacacatatgaataccatccactttcggcatcataatatctaatacgactagatgtatttcattttcttccaatagacgtaatccttcttctccgtctcccgcttgtaatactttatatccttcattctttaaatagattgtaattaaattccgaatttctttttcatcatctacgacaagtattgtttcgtgtgccacaatatctcccccatcacttttttaatccctaacttctattataggaaaacttctgaagaaaaacgctcggaaatccttaagattttctgaagacgcaaaaaggtctagactccccttaagtctagacctttaaaaaaccccttttatttacgaacgtagatgaaatatagtacgaataaaactcccataacatacataattggatgaacctctttacgacgaccactcacaaccattgtaattggatagaagataaatccaatggcaatcccagttgcgatactatacgtaagtggcatagagataattgtaaagaatgctggtactgcaatctcgaatttcttccaatcaatttcccctaaggaagaaaccatcaagattcctacaataattaaagccggtgccgttacagctggcgttacaacacttaataatggcgagaagaatagtgccagtaagaagaatcctgctgttacaactgctgtaaatccagaacgtcctcctgctgctacccctgcagacgattcaatgtaagacgttgttgttgatgtacctaaaatcgcaccaattacagttgcaatcgcatctgcaaataacgcttttcctgcacgtggtaatttattgttcttcattaaccctgcttgatttgcaaccgctacaagcgtacctgctgtatcaaagaaatcgataaagaagaacgttataataacaatccccatttgaactgtgaaaatatctccgaagtgcgttaacgccacgccgaacgttggttctagacttggtattgctcccaccacagctttcggagtatcaattaatcctgttgcaactcctaagatcgctgtaagaatcataccgtagaatactgcaccattaactttcttaatcatgaagatgatcgtagtaacaaccccgaagattgctagtaacgttgtgccctttgttaagtcccccaacccaacaagaaccgcatcgtttttcacgataattccggcattttggaatccaaggaaagcaatgaataatccaatacctgctgctactgcaaactttaactccgatggaattgcattaatgattttttcacgaatacctgaagcagtaagaataataaagataatacctgacattaatgttccggcaatggccgtttgccacggaatacccatcgttaagactgctgtataagcaaagaacgcgttaatccccatacctggcgctaaagcaattggatacttcgcgaaaatacccataattaacgaaccgatcgctgccgctaatgccgtagcaacgaatactgcacctggatccatccctgtacctgctggtaaccctttaacatttccaagcgacagcgtagcaggattgacaaatagtacgtaagccatagatagaaatgtcgttaaccctgctatgaactcagtcttataattcgtaccgagctcatcaaactgaaaatagcgtttcatcctatgtttcccccgttatatgattactcgccgtatttcaccctagccctcttttatcccgagaaataaaaaaggcttccattgcatatatacatggaagcgttctataaacaaagacaagtttcccctcatctttatacaaacgcctcgtagtcaagccatttacggtagctaggtagaaactttcgggccatatccccgatattatacgacggctataatattcacttttcgtttgaattacataatcatattaactcgacgaagtagttttgtcaatttaaaaacgaacattttcataaacttttatagtttcgttcgtattaatgccaaaataaaaaagatccatctatgcataagcaatagatggacctttttataaatactattcccactcaatttacaaaaagtatcacataagaacacacactgataaataaacacttttaaaacgtataaaacgcttatttccatctaaaacactcaaataaaaataaacaagtaccatatgagtaccacacaacatataaacaaaagagcacagcgtgtatatacagtgcgatcaacactctatataccgtccgcctactcacgataggcaaacacctgctgtaccctcacgcactattttacagtacgtaagggctcctagcaacagtttgcttacatttggcattctgttgcttttttgtttccaaaaaggagacaagatttataatgaaaacgaaacgtatagacgtaatagcaaaagaagaatcctatcacaatttatccgtatttattgatgtggaagaactaaacaaagtcgttagaacatacaaagacgtcattagaacgtctgttaaacgtgccgatgtacaagctagacttattacattattggatattttaaagcgtcacagttgtaaatatgtaggcgttagtttcctatgcaaaaattcaattgctgacatgatggaagtatcctataaaactgtacaacgtttaatgaagaaacttgtggagttaggcatgattaatcaaatagcaatgaagcgtaaaaaagatatgcgccaaacttctaatgctattattattcagccaattgtggaggaagtgtccaacaaggtagatacaaaaagtcctacaaagtgtcctaccattaaaacaaaacctatttctttaaaacaaaagattaaagatataaatatacgtaagagtaacgagtctcaatctaatgtcaatgataatgattttatcgattatcgagttccacaatctatgcgaatgaaattagcaactgcatttgattcaaaagttatcaatgaatccttccacaatgctgtgaatatcgttaaaaaggctgctaagaaatttaatttactatcagacaaagatgtatttaacaacattattgccaatgcttctgttgctttattctctaaaactcatgaagctgagcataacgggactcttatgaaaaatcctattggatactttactaatacatttaaaactatggtatatgactacatcgatagatttagagacatccacaatatttctaaacgtaaagaaaataaccatgttggactaacaggtatgttcaaacagtttatcgatgggtaaattcgcttatttcaacgggattgtaaataacttaatggataagttttactttgatggggattttatgaccaaataaaaaaacacccagttctaataactaggtgtcccaacttttaaaatgtccataaattgtattttattttacaattctctttatatatccttattcagattcttttaaagtgatgggctcattttcttttataagctcctcttccacaataatagattcttcttttggagaatagtattcataaatttcatttcgaacagaattacgtatattttcattttctttcaggaattgcttagcattatctctaccttgcccaagacgctcctctttatacgaataccatgatccgcttttctgaacaatatctaaccctaccccaatatcaacaagctctccctctagggaaatgccttctccatacataatatcaaattctaaatttcgaaatggtggagcaactttattttttactactttcacttttgttttattaccaacaatgtcactgccttgctttaactgctccgaacgacgtacttcgagacggacagttgaataaaacttcaacgctctaccaccaggtgtcgtctcgggattcccaaatgaaacgcccactttctctctaagttgattcaaaaatatagctattactccatttttagatactgctcctgatatcttcctcaaggcttgccccatcagccttgcttgcagtccaacatgtgatgctcccatatcaccatcaatttctgcctgtggtactagagctgctacagagtctactacaataatttcaacagcgctacttcttactaacgcttccgctatctctaacgcctcttctcccgtattcggttgtgacacaaacaactcatcaatatttacacctaacttttctgcatatacaggatcaagcgcatgttccgcatcaataaatgccgcagttccaccttgtttttgaacttctgcaattgcatgtaatgctagtgttgtctttcctgaagattcgggaccaaagatttcagtaatgcgccctttcggatatccaccaacacctaaagcattatctaatccaacagagccacttgacacaacagatattttttgttcaggtcgctcacccagtttcataacagcacctttgccaaaatctttttcaattttcttcagagcctcttctaatgctttctcttttcctttagttgtattttcagttgctgccatatgaattgctcctttcaagaacattcgtttgtataaattatagaacaatcgttctgttccgtcaataaattagaaacgaacatttacagttgttgcatgaaattggtatgatttacttaatttaagggggatgattatatgaaggttgtccaattaatatttagaggatttcgtttaatcggtagaattattaatccaatactaaaggcattatctaaaagtaaattttaaatatcatagcaataaaaaaaacgcccatttttgcactgcaccaacttgttagacgcaattaacacaatagtgcaaccaaaatgaaaaaaatagttatgaaaggaaaacagatgtgtaaactcaaagaatatgacctggcatatatttgttactattctgagagaatagagttttcagccattgctgctggattttcacaaccggtgtcaactaaggtaatacatcatattgttcaagaattaaataatcagggactatttgatttttacaagagtacctatgaggaaatgttagaagaatgaggagagtggctacatatgttaacgaaatcgcaatacgaacgtttcgcagcagataagcaatgtatcgaacgtgcattaaccatgtggaaagaatggatgtgcaaaaaaaagacttatacagatgaacttgctgctcaaggtacgatgtacgttgtcaatcatatgaaattacgagatcatcaagtttctgtaatcttcgatttttttgatgagtatttaactttattagatcacggagaagaacaagcagaagctttttataaaaccattatgaggatgtaataacagagggttctctcacgaataactaaaaaagagtatattcataaaaaataaaggtggttaatacaatgaaaactacgaattgtgggggaatatcttagtaatacttgccctactctatgcgctgttatatactcttattgagaacacacttctgtagttcccttttggtgtcttacaagaattgtagttttgtcatctttcttttggattgaaacacaggaaaagatacttcataatgaggtgttttttctttttccaataggttgttaaaaaccacatctctttaccatactaacaatacagttgctatactgctatctatacaactttcgaggtgatacagcacgaaaaaatatcaaatcgtttatagtgttttctctcccagtgggcaacaatacaaagaaaagtttattgaaatttacgcaccaacagttgagcatgcaaaacacggaatagaaactgaattaaaaagaagaatgggcgacctataccaatggcaaatagacgttcaacaaatagaaggtgaacaactctcgttattctaaacaacttgacgagataaaaaagaagatgtaaaatgattatccgtgtaaaaaacttggtttatacaacccaacacgttgtgacagatcgggctattgccaacaacttttatgacattcttagttgtgtttagcaagatacacgggagaggtttacagattcgtaataatgaagcaagtagggcttataacttattatggtataaaatatatgtaaactgcatactctagaattgacatctaaagaacttacaacatgaaaaagacatcttcgactggggaaggtgtctttcttacctttagtcaagtgctattgaaagatttgattcgatgaagtaatttattttttagagtgatgggtatctttcctctaaaaaataaatttgtgtacaccaaatagacctaacgagatatcatttttttcgcgaggtcaattgtgctatagtatatttagttgattacgaaccggttgatgctatttcgtaatcatatagtttttcgtgtgtaataagatgaaatgccactttcaaaaacttattcatacacgcaacggatgcaactttatgaggctttctcaaaggttgcttctttaatttgtcatagtattctaccagatgattctttgttttcttacgtaatgtaatcatcgatgtaaccataaagaataagattttccttagtttattgtttccccttttattgattttgtccttataatgagtattccctgactgataacgcctaatatcaatccccacataggcatttaattgcttattatttttaaaacgtcttatatcacctaactcaccgatgattcgaacggctgttatttcccctattcctggaaatgaccgaagcacatgatattctgtacgttcattagaaagttccaccatctgctttacaagctgtgccttcttctctttcaagtctgcaatgcggctggcataatctttgacttgctcgcagcgtacatcgtttcttgagattgctgggtaagagatttttgcagctttaaggagggcggttcctttctcttctactcgtttcaaagacaaccgtttttgtgtatttgcctttaacctactgcaaattctcgttttagaatgggctaacacttcatccgggtgtggatatagttgtacgatattcaaaaacagggacgaccgctttgtaaatagctgttccaactctggaaaactcaattgtaggattgcgtgtaaccgagaatataaatgagtaatctcaatgtctaactcatcatagtaacgtgtgagtccacgcatctgttggtagtatcccttttcttgatacgtttgttcacgtcctactcgaaagtgcgattttgccagttcatgcgcgtcgcttttatctgttttttggcggcgcattgaagccgtttgtaagtttgcttcaagaggattaatacgacaatatgcataattattatcttgaaagaatcgttccaacggtttggaatatacacctgttgcttcaaaaacaatttcaggttcttctccacctcgacctatcagttcctgaagcgtttcatgaagctgttcaaaagagggacggttatggttaatttccttctctacttcacattgacggtatcgattgtaaataaccatcatacttttacccatactgacatcaaaagctacaacgtgttgcatgacatgaatctctccttttttgccaatcatagaagcctccacagtgccttatcgattccactttcttatacacgatctcctggatccaacatactaaactgattcaaataagggtgtgaagtcgatctgtttatttatacggactccaatatggtccaagacacctttcgaccttacttcacttctactaaaaaaaatagtagcacaaaccgtggccttggtttgtactactaatgttagtatgttttgcatattacacggtgtacctacatataatgaaatcgacagtgattttttctccttttatgataaatctattgaaaaaagcattcttggggacgaatgctttttttctattccctatttcacatacacataggctccaatcataaaccctatattaaaagtaaattttaattacatataaaattaacacgttcctcttttataataaaactattcttttgtatagtaatgtgttttacttttcaaactttacatattcacctgaaacccattgatcaccaccaacattataccaaccgtccctatatccccaagactgatatctttcgctttggtgtacgttttttacgacgccataattagttcctgggccagtacgaacgcgtaatacatctgctgtaatagtaactacccctaaaccatcatttgaaggttgcgaagttgtggatgattgtccatccgcttcgaaatgtaaccactctgagttttcgtaaacccactgatcgccacctaaattaagccatccgccagaacgtccccacactttataattttcaggtgcatttagtttcctaattgaatcatattgagtccctggtcctttacgtaagttcacgttttgaccagtaatataaacaatacctgtaccacttgtaattggtggttgtggaatctgtggcgtttctggaatttgaatttccccaccagaaactaattgttgtttaaaccactgtacacgcccttcattaatcattctatgaggacaatatttaccgtttctttcttggtgtgttttaactttagaaattggaatgttgaacatatccattaactgacgaattacttgagcggcattcaattcagctttacgatatctttccccacctgacatagaataacaaatctctataccgatactattacgattacctggtccattcccatcacctgcatgccaagcatttctattaaacggaattaattgaatagcttctttgtcatctacagcgatatggaacgaagtacctgtactattgttagcgacattattacgttcgtttaatgccgtagcatcattatacgtgttgtggaatgtaatttccgttggattcattggatatggacataaaactgaataacgactttctggtactaacatttttttgatttccattactgaacatctccttttttctcttcctgtttttgtttaccgcccaaaatttcaactgcatttgttaatgctgaaggtaaggggattcccatacgaccagcgttttctaaaagtgaaagcaactcattgcccatgaagaagaaaatagtcgcttcacgaattgcactgttacttcccagtgctgaatctagttgagcggacgctccgaccaaaagaaaaagcaccacctttttggcgatgcctttgaaaccaactttactttttaattctccgttataccctgctgcaatcatgccagttaaataatcaataactgccatcgttactaagattttcaatgttgcatcccatcctcccaaaaaatacccacaaaagcctccaaatgtagctataaatgctttcattaatatatcaatacgatccatctttccatctccttatttataataaaaaagagagacgcttgtccctctctcaataagtacttttattttaagatattaaatcatcccttttaatattaaacccaagactgacatagtaattgcactaataataattcgtaaaatccaagttgtattaatgctaatcttttctaattgcttattaattgtagcaatgtctttctcattaattgttgtgcgagtttctaaattacgaatatctcgcataatttctttttgttctgcttttaaactgtcgatttttacatatacatcttccactgcattcacatccttttaaaatcttaataaaacaatctctacatgatatgagacaaccttatttatggtgaatgcatcgcagaaatttcaaaacaaaagccgtattttgtgcaaaataaaaacagcttatggctgccctatttgcgttgtattttcaattgttaatgtctcttgtggcggatattcacctgtaagtttaaaataatcatttgcacaaatgttccttttagcaactcctaagttcaattcatataatttggctccacaaccacataactcacatttcgttaaaaccctaaaaccaatagttccgtcagacatttccctccacacctcaactttactcgtatcattggaaacccctgcattatctaacatgtcagcaggtacttgtataaagactcctgtttccgttcgtttcacgtctactattcttcccatataaggaagcgtttcaccttcttgaaaaggcatcatatagttaatatccatgtttaatccttcctttctatccaagtgcgttaaatttccagccacttggagtactcacataaaaacccgctccagcattaccgtctgtaaaacgaatatgtccccattgttggaatccaccgccacctaagttaatcccctgcattgctcgtatattcctatggattttcacttctttttcagtacttatatcaaacgtttgtccgtctggtgatggagatatattattattcacaccacctacagcaagcgcgttaaacggctgaataccatctgctctttctgctgcagcacgatcccaattatacatagatgcatatttgccactgtataacgttacaccacttacacaaattgctgtcccttgtctcatgtcagcatttccagaacaaactttaataattaatgcgtgctgttgcggaatatagtttgttggcactttgaaagtgaaagagtatcttctgatttctccataaaatgtagacggttcaggaaaatccattttttgttcattccatatatcgtaacttacattgtctcggaatttaacgcagcatacttgtaaacgaggtttccctgttttacgtgcaccatttatcatagctgttctaaagtgagcagaaactgtatattcgttaccaggatgtatcccattattcacgactgtttcgggatagttatacatatctacccttgcagcatttaccatttgctcgtaatcgaatatatgtgtattcttttctattacgacatttccccatgacttccaagtaagaccatatccaccttcaaacccataataatcggtatgtccaatgtttttctttgtaacactagaaaagtcgggatctgatattaggtttcgtcttgataccgcagttgtttttgttccccattcgtcttggaataggaaatctagcattttaacagttacaccatctttatcaatagttatcttatcaccgtcaattctaataagattcgtatcaatgccttttgccgttaaccatttcaccattgtatcggcattaatagctacctttgaaacatcaatctctaatttttccgatgaaaagttaatagctgcgatgatattcccttttttaacttctgcaaggattccttcatcaagaaccttaagtttagaacccgttgcttttacataagcggcgtaagtctcatttataaacgtttcttgtttttcagaaatgattgaaacgccctctttattagtactaatacttctttctaattctgtaacttttttattgtaatcttcagtagctattctattggctatatcttctagcattttgtcagcatccgtttgatcttttggatgtagccaaaattctgtagctatagtgccacgttgtaacataggtgcagcacaccataaacgtccatttcttgtaacgtaataacgccatctcacaaacgccgcattagctggcgctttatctgtgcatacagcacgaacccatgtatgatttacaacagtgatattcgttctagctgtcttaatgcgagtttttttgtcagcagtccaccattcaatttcaataaatgcaccgccaccatcaataggtgttttcccgtcagtattgaaataacctgatgcaacaaagtcttcgttaacctgacactcaataaattgacttgtaagtccccaccaacgatcttgggactgtccagtaacagtaattgcaaatgtattcatacctttgtattttaaattcgtatcaacagcaccagtagccccattaccgctattccaaaaccaatatttcggtcctaacgtaaaattagcatcacgcaactcgttgacagtacctaaaccacctacataagcttcaacatctttctttttcattgctagcttcaattcttcagattgttgcaggatcgttgtagtagcttgagtcagtgtttccccttgctgagtttgtatttcctgtattttttttacatcacttgttatcccttcggcgttccgcgtaatctccgttactttctggctgaatacattttcttttaccccatcttccggagacggagcgtatgcttttggcatagatccttttaacacggatacatttttgaagtagcactcactaccatcagcagaacgatcaccataaatatataaactaaacccttttttcatatctgatttatcatgtaatttcattgttgtatgaactcgaacccactttttaacaggttcgatggtcaattctggcgtacctccactatgaaagcccattgtattgttaccctcaataaagtggtgtaatcctaccgctattttgttatttgctgtttccgtccatacatctaaagcgatcgtgtacgtatcacctggctggaaatcatttcgaaaactagctggcatttcttgaggcattccaagccaccttttagcttgaccgaattgaccatttttgttaataacagcaactacaggatacccaaactttttgtcatcaacgtgcatatgataaccctttgtaggatctgttgttccagcgttataacctgttgcccaattaccagcgcgcaaattaccgtttaggttcttatcccattgcagatcgttatcggcccaatagtgtgtgaaatctccgttacgtgcatagttacgatcaccagcatcattaatgatagattccgttttttcaatacgttcttttacaccctcaaaactttgctccaactcataagtcgattttgtaaaacctgtaggaacggaacctttttctagtttaggtttcttgaaacgaaatttcttaccctttgaattttcgtttctttcaaatcgtaatcgcaatccccatccagttgcccgcgcatcaatcttaaatgtaaatgatctcctagaccaattagcgacaggaaatctattgtacaagttttctgcccaaactccattaataaattggaatacaattaaatcaataagagcatcattttgcatatcgatactaaatgtcatatctttctctttttcgtagtcacccatcttagtattatctagatggaattgatagaaagagtcggtatgatctgtacattctacgatcatgtaatcctcagtgaacgattgagcagctttgttgactagtgcgcctccagacattccaattgtttgtggcttttgatttcgcccagtattgattagccagttttcaacgcccactgtacgagattcaacctgctccaattttttagagattctcccagcctcttctttgatctcggttgttatcttggtgaaaacattaccatctgcaatatcttcaggagcaggtcgccacgaataatctttactgcctatagtcaattgtggtgaactctgctgataccaacaaccagcaggagggtttgcatcaggttctatacgtaaatgactctcgttatctgttcccggtaacgacatcatacttgctgtcactgtgaacgaaacgcttaccctttgccattgattagtagatttatttggacggattccggtagcacctggtgcaaaatagaaagtgtgttgtaattcttggccatccggtaaaccttttactcgagtataaattgaataggttactttatctcctactttgacaactccccgattcaccaaatctttgaagttataagctaaagcagtccatgatgattgggtttcaacaactgcattaccttgaaaaacatctttcgaaattttaactttatcggctgatttaaaccaccaacgattgtctgcttgcgcaaagttcaaagcaccatcaaaagatttagaaccgattaataagtttcttacatcgtcattaatgtttgctacactttctttaacttgtgaaataactttcgtatttccgtccacatcactttctaaggtgttgattttatttgtagtctcactactatttttcgttaatgtttcaatagacagtttaaatttctcagaatcctgttcaacctgggttacttttttatcaatttcaccttgatctctttgtacgtcagaaatagttctcgtaactttttgaagactttctgttactgtattaaattggccagtggtttcttgttgcgcttcttccactttcttatttaattcttcttttgcgagtttaatatccttattaacctgctccagtgtatcttttttaattgattccacatcaggaataaggagttcccaacctttaccgttccacacttttaaaacaccaggtttaccgttactaatatctcgccatatcgtcttaccaattttaagattcgttgttggtggattcacagcctcgatgatttctactgtattattcttcaagttttcttgaactttctctgctaactctttcgctgctttcgactctttctgtgcttcatttacttttttatcagtatcttgtacaagttcttctaatctatctaacaattctttatttgctttatttcctaaagtagcgcgaatcctattgtacatttttcttaactcttcgttcgcatcagtaatttcacgataatcgccaaacacgtattgatcttgtgaaggatcagtatgtgattcatcaccaacgattgcccttgcttcaaggtataacttaggtgtgaatcctgtatctttgattcggattgtatcgccctcattaattagttcatgtgctagtccgaaaatacgtccaatcgattgcgcttctacttcgtatgaaacagaagatacacgttttgctagctctgttttcataagagtcagtaaacgttctggtgtgatatttccttctgtttctggagtatagaaaccaaatttatgctttccatgttcattccaccgttggaacgcatcattatcaacaatgtaaggaagtccgttattgatactctcaattgtgataagtttatcaccttcatctcgtacaaaaccgacaagtgctgtgcaaatatctcttgagtgctcaatacgtctaacaccaactaaatcttttcctagcactacttcttttccagtttcttggccacgtttccttatcatatctacataccggccagtgatttgagaacctactacttcgacacgatattggatttctaactcaaataaagtagcgattttctttaaaaaagcgagcggatctataaattcatcaatagtcattgtatggaatgaagaataatcggtttttccacgtttccactttgaatccgcaagagcaatatctataaacgtattaactgtttcactctctatgtgttgtggtttaatgaacccatccttggctatttgaacccaagcgccagaagcatgtacagtaatcgttctatcattagattctttttctacttcattattgataacatatggaacaatacgaccatcacgcacttcctttaatactaagttctgttgttgtaatgcaactgcatgtgaagttccatcaaaagttttaaattctaacgtatcaatgttgtttttgatttcccaatggcgtttatcatcccaatagtcctttgattgaatgactgatataatctgatctgttttgaaatcaacaacatgaagtatcccacttggtgttctcatctaaatcgctccctatatttcacctttgctgttcctatatcggaaggtatgatttccagtgtattaatacctttattgataacaggaaaattactaaaaatatcttttatgttaatagcgtttttcccctcaatactgacatgactgctttctgtatcaatcacgactttgtcaccaacatcgaatatataaggcggtgtattttgattatttaaattcactttccaaaatttcaaatcagaaactgacatcgcttctactggcggaacatcttgccactgcatgatactaatctgtatttgagctgctttttccatatgtttattgtctttatcggtccatcttgctctgacgatgtattcaccacaccacagaaagacgctgtaacactttatagctcggtttcaatttctattcaagcaatacaagaagttcactttgaagttaaaaatcttcaatttgaccacggtatgttgaagcaggaagttgacactcttaaagaacaacttgaagtagaaaaacttgagaaagtttcaatgaaagctgaaattgctgaattaaaggtattagtacaacaattaataaatgaggaaccaaagcagccataagctgtttttattttgcacaaaatagggcttttgtataaaaaaattttcatgcattcactcagaaaagagttgtctcatagtatatagagattgtcttattaagatttcaaaagggatgtgaatgtatggaagacgtatatgtaaaaatcgaaagcctaaaagcagagcaaaaataaatcatgcgagatattcgtaatttagaaactcgtacaacgataaacgaaaaagatatttctaccatcaatcagcaattagaaaaaatcagtctaaataccacttggattttacgaattgttgtcagtgcaatagttatggcaattttgggtttgatacttaaaggtgggatttaggttgtttatataaaagtatttgtgaaagagggacaagtgtctctcttttttatcttgaagaaggagggaagaatgtggatcgtatcgatgtattattaaaagtttttattgccactttcggtgggttttgtggttatttcttgggaggatgggatgcaacattgaaaatcttagtgacaatggcagttattgattatgtaactggcatgattgcagcaggatataacggagaattaaaaagtaaagttggtttcaagggcatcgccaaaaaggtggtgctttttcttttggttggggcagcagcgcaattagatgcagcgttaggaagtaatagtgcaatccgtgaagcaacaatttttttctttatgggtaatgagttactttcacttttagaaaatgccggaagaatgggcattccacttccgcaagctttaaaaaatgcagttgaaattttaggtggcaaagaaaaacaagaagagaaaaaaggggatgttcaataatggaaattagaaaaaagttagttgacccaagtaaatatggtacaaagtgcccttatacaatgaatccagaatttatcacagttcacaatacgtataatgatgcgccagctgagaatgaaattgcttatatgatacgaaataataatgaagtgtcattccacattgcggtagacgataaagaagctgtacaaggattacctttagaacggaatgcatgggcttgtggagatgggaatggttcaggcaacagaaagtcgattagtgtggaaatctgttattctttaagcggcggggatagatattataaagcagaaaataatgcagctattgttgtagcgcaaatcatgaaacaatacaacattccgataaataaagttcgcacacaccaatcgtggagtggaaagtattgcccgcatcgtatgttagcagaagggcgttggaattcttttattgaaagggtgcagaacgcatataacggtggtgggaatgcaggttctacaaaaccatctaacaatggtgtaggtgttgttataattacagcgaatgtcttacgcgttcgtacaggtccaggaacgaattatggtattgtgaagaatgtgtaccgaggggaacgctatcaatcttggggcattcaatatggctggtacaacgttggtggaaatcaatgggtttctggggagtatgtgaggtttgagggttaggataacaccatttttgagattgttcatactctgagactacgaataaggcctatgtgtatgtgaaatgaacggaaaagagcattcctctgtgaagtgacccctaaaagttagacacggttatttcattaggcagcttgataaaagtgagtccggtattgtaccgggctcatttttaattttgccttaatccgtttcgtattataataatctatatatttttctaattctattttaaagtgctctacattttcaaattcttttatgtagaggaactccgacttcataatcccaaagaaattttctattactgcgttgtcgtaacagttgccttttcgagacatactctggacgatagctcttgattcaagtgtccggacgtactgtctcatttgataatgccatccttgatccgaatgcatcagtagctggtgggtttcaggtaaacgttccaatgctttctctaacatgtctgaaacaagcgaaaattgtataggtaataatttcaccattatacaaatctaatacaggtgatacatacagtttttctccaaacaatttaaactctgtgatgtctgttacccacttttgattcggtgcatctgtatgaaaattacgctctaaaatattaggtgcaattctaccgacttttcctttataggatttatatttcttcatacgcacaacacactttaacccaagctctttcataatgcgctgaaccttcttgtggttcactttctggccacgattcgttaattcatcacgaatgcgacgataaccataacgaccttcattttcctcataaatcgctttaatctcagctttcaaatcggcatctacatctggacgattcattttctttactaaatcataatacgtgcttcgaggaataatagctagctccacgagtgccttcaccgaatatttatgccttaattcatagactacttgcgctttgtcttgttttgtgatttttccttgttttgaactaaggcatttaacttttttaagtactcattttccatctcaagctgtttaatgcgtgcttcaagtgcttcgactgatccttcagctaaaggttgttttacttgtttatttgaatcttttttcatggatggacgcccctttttcttagattgaagggcatcaattccttgtgtttcgagctgttttttccaaacagaaatcgttgaaggggcaggaatattaaagatagctgccgtctcaaataaggacataccgttttcaatcataaagtttagtacgtctagtttaaattgttgtgtgtaatttgtacatcgttttagaaaagcttccagaccattctgtttatattggtttacccaattcaaaatgattgtgtcacttataccgagcgatctacccatttctcgataactttcatttccgttcaaataacgtagaacgatttgtattttttcatcagctgtaaatttagccatagaaaaactgcacccccaattgttagactgtgtctaacaattggggtgcagttcactggcgagtgagggacgctcttttttaacattataaagatatatctctcatttggtttgtcgatagtaatcatatgtaacgaaaggaataaatatgaacaataaaaatcagagtactcttgtggagtgctctgattacataggatgctatataaaaagggaacgtgttaattacattgtatgtagcaacatgctgaaatatgagaaaaagcaatccagggtggtgaggccggaatgctttttctgtatatagaaaggcatcatgctaggagcaatttaatatatgcttctaaagtacgtaatgttccatcaaaataaaaaggcaccttccccagctgaaggtgcctcatgtggtgattctctaaatgtataaatagtatatccaatattagtgaaggatagaacttattattgaccgataaatgtatatgttaaatatatttttacaaaagaatagttttataaatcagaaattcttctaacttgtttttctttcttcataaaattcctcttatattgtttaaagtcttgtttatcgactctgaacttctctccagtagcaacgtttttaactaaatatgttgtacgcttaaattctctaatgtaatagatcactaatccaactaaaagggatatacacattgttgctgggatagctaaaatacaaagaacgataatgaacgcagaaattttatctgattcataaactctttttaacactatgcgttttccagaagcagcttgcgcttgttgtaattgttgcatgcgttgtagcgatgcgacggtatcataactcacgtgttcaacctcctattttaagttgtattgaattaatacatattcataatattttattttgatgtaactacactgttattgtacattttgtctacctgttctttattatatccatatgacagtgtcaatctgtcatctacaaacaaacaagtgcctacattaaagcctcgacacccagccataaatttagaaagtttaggaataaaaccaattgcttcaatatccattaaaataaaacgtactggaatcgctcttttattttgctgtgcaccttttaacatatggctcataaatgaaaaaattcgatttcctatatcgggcataaagtcttcttgttgttgatcatgatctgtatacgtgaaataaacaataattttacgctttaatagttgcagtaaatcttgtttagaatttgaatgtagttctgtataaggaagtaataagatttcataaccctgatcatattttagagcagatgttttttgatacataatgcctttgtaatctaatacaaaaagtgattccgcttcaaaacctatgataaattgctctacttcaattaatccatttttaggatcataatatttttcaataattcgatttaatgttttgaatgatggttgttttgacattgtaattactcctggttatattttttctcttggtgtttttcagtggctaatttttcagatgttttcctgctcaccttaacttttaatccgtattttctttcgtaaagttcttcaaaaacttcctctatttttcgttcaccgtatacttcttttacaatcctcaagttggttttgggtctaggcatatattatattatctcccctcttcaatccaaatttcttccacagtcagatccaaagcttttgcaatacgaagcgcaactcttaacgtaggttcacttttccctcttgctatcatgcttaatgtttggtctgtaatacccaccagtttcgcaagatcagactgttttagcattcgttcggccaagattatctttaatttacacttcataaaatccctcctttttcaatgttctatttcaatttttaaaaacctctaatatttttatttgtggacaaacaagttttaaagttctacatcatatacctatattacttccactcagaagcccacgaagacttctacttggaattccaaatggcatcgtagatattaagagaggagagggttgcatgcgttctcagtatagttatctcaatgtaacgccgtatttatattcatcaaaagaattacgtcacatgtataacgaatcaagatccagaaaagagacggaatctattcttactcacatgaggaaccatgaagtatttgataataaagaatacaaagggtatttcaacttatcacaagttattgaagaagatttatatggagaagaggaagatatattgaattggcaagatttaatggagcggtatcaaattgtagctaccaaatcagggattaaatttcgtgagaaagaggaactggttgaggaggaatggctatgacacttgcaggagaagcagtcattatttggacggcaacaggtttgtctgtaattgcgatgagtgtagctgaaaaaatggggaagagtgttccacattggcttccacgtataaccttgtatacgacgcttacgggctcgttcttatatcttctacgttatgttctcgttatgtttctatgaaggaatatgatgtggaagagagggacagtagaattcataagcgaaaatgcttgttctgtcttcttccaacaaagtgcaatgatatccttataggatatctaaaggagaaatgtttatgctggaattactattggtcccgacgacagctttaactattgcattcgtaagtgatcggtttaaaagtaaaatagatgataaaaagaagatacaagtattttttgaagtgtcaggaattgcaattaaaaaagatgataggattcattatccaacatttaagaagcgaactcatgatgatcgaagtacaacatatgtgtatgagttgcctgttggtatgccgagtaaaattattcaaaaagttgaagatgttgtaagtgaagggttaaataaacctgttcgaattcagtatgacaattataaattgaacatacgtgtattcgatcaagaaataccaaagaaatgggaatggtcaacaaatttaattcaagctggaaaatggcttgtgccaatcgggcaaagtttagaacaattggtttatcatgattttgataaaacaccacatatgacattaggtggtttaactcgtatgggaaagactgtattcctaaagaatgtgatgacatctcttattactgcacaagcaaacaatacgcacttgtttattattgatttaaaaggaggattagagttcggaccgtaccaaaacataaagcaggttgattctattgcagaaaagccactggaagcttttcaggtattaagcgcgattctaaaaaagatggaagaaaaaatgctttttatgaaagaacaccattataccaatgtggtagaaacaaatataagagaacgctactttattatcgtagatgaaggggcagaactttgtcctgataaaagtatgaatagggaacaacaaaagttattaggagcttgtcaacagatgatttctcacatagcgcgaattggtggagcattaggatttcgattgattttttgcacacaatatcctactggcgatactttaccacgtcaagtgaaacaaaacagtgatgcaaaattaggatttcggttaccaactcaaacagcttctcaagttgtcatcgatgaaactggtcttgaatcgattgaaagtataccagggcgtgcgctttttaaaactgatcgattaacagagattcaagtcccttatatctcaaatgaacagatgtgggacgtattaaaacaatacgaggtgaaaaaggatgcatatgcagacacatatcaaaatgaatcgtcagatgatgattttgacctcgattagaaagctaaaatttgcgacaagaagacacttaatggcaattcacgatatgggaggaattcgaaatgcaaatcgaattttaaaagatttaagtccatatgtgaatagtaccgtttataaaaaagagcatgtatattacctcaataaacaaggacgtgcgctattcgatgatgtagaaaaggttgtgcccaccattcgattagcacacagcctcatgagaaacgaagcgtggctgaatctattttgtcctgaggattggcagatagaagcccctatacgttataaagtagatgacaagaagcgaaccattattccggatgtaaagtaccgtgatagtgacgggattctcaatgcagtcgaaatagatcgtacacaaatgatgaatgtgaacagtgaaaaaatgaataagtatggtgaattcacggtgtattataaaaacaaatataacgggaaagtccctatccttcatttctttacactcacaccatttaggcaaaagacgctagaacaatttgctgtgcagcaaggtgtatatgcaaaggtatatgtgatacctgaagtgtaaaagagagcatcacataccaaattcagggtcaaaataatatttgttcatcaaattgtttacgataccgttgaaatacgcaaacttaccctttttcattttgactccatcttttaccttcatcgcaaattctttcatagcttgtacaccaatttgtagttcttgttctttgtcaaacgccgtttggcctgttgtatgatttattacacaattgcattgttttacgaccttccaaaattcttgaattgttttagcttttgaataaaatgctgaagttagggaaacgaaacgtttcggaacccaatgggctacaaattcagcacatttaatgttttctttaggtacagcattattgtcattaccattacgtttatttatatctttactcttttgttttaagattttagtatttgttttaacggtaggacacttcttagtcgtttcagtagggtgcttgtgggacacttcatttacaattggttggataataattgcattagaagtttggcgcatatctttttttcgcttcatggctatttgcttaattattcttaaagtcacaagtttcgtcattaaacgttgtacagttttatatgatacgctcattatctcagctattctatttttacataggaaactaacacctacgtatttgcagctatgacgctttaaaatttcaagtaatgcaattaatttagattgtacatctgcacgtttaatagacgttttaattacatctctgtatactctaatcgtttgatttaattcctgtacatttgaaaatgttgataaattatgataggactctggttgagctaatacatcaatacactttttcataacggtttgtctcctttttggaaacaaaaaagcaacgtcaccgatttattggtaaacgttgcttaataccccttgtatgaggtaaaataactcatgagagtatagcaagtgtttacctggtcagctcaggtggacggtatatacggtggtccaacaccatatatacacgctgtgctcttttgtttttatggtcacattttggtaacgaatgaataaaatttaaaatttattcatgatttttaacgttacacaaaccgttgatatataagggtttattactatttttaaaacgaacgtaaataacctttattgacgaacagggtcaattcctttttttgttttcaaattcttcttctgaaatgactttaaatccgtgtcttttaaataaagcagttgtcactccgaaaccagtttgcttattaccgttaaattctccagtgtaaatcgtagaactaccacaagatgggctgcgttcttttaaaataatatattctgggtgtaaatctttaatttgttctaatgctttataagcaccatttacgaaagctgctgtgacatcttcaccattttttgttatcactttcgcttttccgtctaaaacgtcgtcgccattcccgccaataatttcagcggaaggacgaggtgttggtagtcctcctaatacttcagggcaaatgaggactgtatcttctttttgcagaagctcctctatttttgaaacgagattgtcattcccgtcataacggcaagcaatcccacctaaacaagcgctaattacgatcatattttcatctccattaaaaaatattaactatcacgccaatttcgcttcctgcctcttacttataaatgaggtgatataaatgggaagcttatataatttaatgaaaccatatagtgaatttcgaagtaaagaagagtttaatacatatcaaaaacaagttttgaagtgctaccgatttcaattgaataaaactgattctatcattattcattttttaggaaaatatgcggtgaatgagaaacaaaaaacagtaggggttgcttgtccattaatggggacgattgcgacgaatgttggaaagagtattcgtacagtacgccgttcaattgcaaagttagaggaactaggaattataaagcgtgttgcaacaaaagaaaggcataaacgcggcgggtatagtgcgaacttatatgtatttcttacatctgcgattgaccgcatggatgaccgtatgaaaatgtccgcttgtaaaactgaggataatgcaactggctgtagtaaaaatgagcaaaaaattgctggggaaacaattctttctaaaaacatttcacaaataaaagagaaaagaaaaggaacgtatgagcttgatgagacgtattgccgtcatgatataccgaagccttttatatacgcactggtgccgatgacgagtaatccgaagaaaattaatatattttggagtaaggtcgagcttgcgtataaaaagagtgggttactagaacaaggtgttttactagagcaaatattagctgacgaagaagtgtatggaaatttaatttggcgcgtgaaaagtgttgtaagagcatataaatatggggaaatttgtaaagacattggggcacttttatacagtacagtgcgagatttatttttagaggttggattagaatggggagcagcattaaggagaagtaagggaatatcactatttgatccattcaaaaaagagccatgcgtataatacatgactctaagtggctaatcgaacttccttacaactggaacacgaatcgctacaaatagtacgaagacgataacagctattgcaccacttttcataacggttacgattggaattcccattgcaagtgcaagtgatgtgaatgcataagagagcgggataaagcccattgatgatagcataagtaaactcattacgcgtcccatcatttcttcttttactgtcgattgaatcattgccataagcggtacaatcgccattgcgattgtaataccataaaacatgccggctaatagtgcttgccaaagtacggtgctaaagttgatggctaagaagaatacaccagacaatagcatcatgataatacaaaatagaccgcgtctacgattaatattttttaaacctacaatgatagcaccgattgccattccgccgcctacagatgcttctaagtaactaaactggagcgaatcaccatgcagaacgtttttaacaaaaagagggaaaccaacttgcatcgggccgattaaaaataagtttaaaaaagcgctacaaataaggaaagttgaaaggaatggcgattcctttacatataagattccttctttaatggaagtgaacatacctttatctgtatctttttgttctggcatcgtaaattgtattttttgaacgagtatggcagcgacaatcagtaataaaatcgtaatggaaaagattgtctcatagttcgtaaatttaatgagaataccaccaagtacagggcctaagatgaccgatgcttggttcgtcatttgtgtaagtgaatttgcttgtgttaaccggcttttttctaccaattccggtaagatagatccatccgctgaccagaagaaagcatcagcaagtccaaagaataaagcgaataaagcaaatgtatatagtgttacatcaccgacaatgaaccatgtgagaatggttgcgacaagaatcgctcgaatgatattggagtaaaacataatgttttttttcgggaatttatcagctacagcgccgccgacaatcataaaaataagccttggaacactaagggctacgaaaacaacaccgagtgaagcttcaaggtttaatgtttttgctatgtaccacgtttgtgaaaaagtaaaaaaggctaaagcaaagcttgaaaaaagagtagctgcccaaagaaaaaggaaattcgtattttttaataacggttttccgcttccttctaaagcagttttattttgttgtagttcctccatattgcttcctttctatgtgacgaatttaaactaaaaaacctattaacaatcgttttatacagtttctaatatttctatactgcactttctcattgtagacaataataatgaatttgcccagtagctatttaacgacaaaaaaagatgccgaatgggcatctttttttaggctaacgcaatataaatatccaattgaacgttgtttggatctaacgctctttcatcgtaaagctcaaagtctgttgtgaaggcacgtttattttctttcgaccatttccaaatatattcccaagcttcacaaacgacttcagcaactggtccctttcttgttgtaaataccgcatatgtagcggcaggtattgttaaagttgtcatattttcaggaacgtcttctaatgaagaaacaggcataccgattgtaaattgatatgtaccggtttcatctgattcgtagtttgagtagaaagcgaatgtttctttcgtttgttgatttgggatgtgatgcatcatttgttcttgaaagtatcggttccaaagttgtggaatgtttccttcagtagatgcctctttttcattagtcgtcgtaaccgaaacgccgattgcgtggaaagcttctttttttacgataataggttcgtgtagcataaaaaattcctcctttttttaaaaaaagaacgtttgttcttgtttaatataacatatttttacatgtaacggttgttatttttagaaaattttaatcataaaaaacaaactgaaaataactaaaaaatggtaaattttctattgtatgtataaatagggtgaggagtatgttaaaatttttaagtatcctttaactgttatataaacctatacagcacgatgtttttactatattaaaagtatggtaaaggtttgtataagtgtccggtatatatgctatttttgataaattaaaatagtaatattctatgagatttatattgttgacattgggatttcaacgatacattttcgtaggtcggattgttgcgagtggatatatattgctatgtattcggctactaaatgaaagggttactgaaatgaagtaggcggatagcaagtatatagaaaggagaaaggtagaaaatatgaagcaagtattgaagtgttttaatgtcgtaacaatgatcacacttcttctatccatcatattgccttcgcccagtgcttttgctacagagataaataaaaaaagctgggatgagttacaaggaaatgatgtgaaaattaaggcagatcaagtgaatgctgaaatgtataagggagaagtagcggagagggagcacgtatttcaatataagattgaaaatacgggagatacaccaatccgagaattagtaattaaacaaaataatgacaatggaattgagtttctttcgcaatctgtgaaagtaaacggagagaagttacttgaaaataaggtagcggatttctatgtagaggaaaaagataatggaggaaaggttctttcttctaatcttaaaattcaagatttaaaatcacatgaaaaaatgactgtattaataaaagctcgtcgtgcgcaacattttaataaagagtataagcaaaaaattagtgtgcaaaaggatcaactacaaataggaaacatgtctgtagatgttgaagggcttccttctgaagagaagttagaagctaataccgatgatgaggctgacagtagtaagaaagctatcggatcaacaactgattcaaaaactaaagaagtggatggaaaattaaaagtatctgtagaagataaaaatacatctgcacaaaaaacagaaatagagaagataaaacaacctgaggctgagaagcaactagaaaaagagaaaaagcaatcacctttagcagtaaagcagagtgatgcagaagtacaagctgcatcagaaaatgcttcgaaggttcaaatccaaacaggagataaacaaggatttggagacccgttgtattctacaattgctcctggtaatttagtacagactggtaatgtgacgcttggtttgacatctgatcattatggcagacaaagtatgggttataaaacgaataaaatgacggttgatgttgataacgatgatagtacttttaattcgtcaacaggtgcatttcctaacattcctgctggaagtaaagtgaaaaaggcttacttattctggacagcagcaatggggttaccaggaaatatcgctgatagaaaggttaccgaggatcaagtaaggcaaccagtcaaaatgagaatgggaaataaagaatatgcagaggtaactgctgatagcataagaaaagctgattatctaccttatatttctaattactcaggtagtggcgcaggatatgtagcgtatgcagatgtaacaaatataattgcacagcaaggtatttctcaaacgttgacagttgcaaatgtgccacaaattaaagatgtaacaggtggcggctattactggggtaactggaatcttatattagtttatgaaaactataaagaaacagtaaaagacatgaagatttgggaagggctagtctctcaaaaaagtacagcctggacagatattagtgttaataaaataaacacaccaaaagaaggcgctttcaaggcggaatttagttatttttcatcgcaaggtgatccagctgataatgatggatatgcctatgattatggagagtatgattttgggttagggtatcaaaagtttaaaaatattaaaagtaaagataatgatgttaatgactcatctatgacagaagtacaagtagatggcactaacgaatttgttacgaaaaaatacccaggatataatccagattggacaaattctttcagtacagatattcatacgtatcaccttgaaggacccactcaagtaaagaatgatttgaaagaaggaaaaatacgttttagagcatatggtggtggcggtgatatttacgtattaaataacgccacattcgttacagaacataatgctccaaacttacaagttgataaaaaggcattagatagtaccggtaaagaagttaaggaaattaaagctggtgaagagtttacgtatcaaattgaagtgaaaaatgatacgaaaaataatcaagcgccggtatcgaatgtaaaaggttttgataaattagatgaccgtttagagtatgttccagggtctattcaatatgtttctggaagtaataaaggaaataaaacagatgatgcaagcgatgatgaagcggagtttgtaaataatcaaattgatttccgtgttggtgaaggtgctaatgctaaagacggcggtgttttaaagccgggtgaaagtaccgttattacattcaaagtaaaagtgaaagattctgtacaatcagatacaacagtaaaaaatgtcgttgttgtaaagggacaagatagtgccgagataaagtatgaaactgaggacgatgcaaatgttacggttactaccccaaaagaagttccaggggaaatagaggcgagaaaaatagcttctaataaaacaccgaagttaggtgaagaggtagagtatcgtattacatttaaaaataagacaaaagatggacgtctagatgtattgaccattgaagatgaattaccaagtagtcttgaatacgtgaaagatagtttgaaagccgaaggtgcaaaaccagagccagtagagctgaagtttgaaaatggaaaagtaattgcaaagtatccagaaattatggatatggaagaaagaagtatcgtctttaaaacaaaagtaaaagaaactgcaaaaattggtgaagaaattgttaataaagcaaccgttagagataaaacaaatccaccaaagaatctagaagagaagattacaccacagcataaggccggtaaaattgctgcaaagaaaaaagcaacaaataagaagccgaggctaggagaagaagttgaatatcaaattagcttcaaaaatacggtggaaaacggaaaactagatgcagttacaatagaagatgaaattccagctaacttagaatttgttcaaggcagtgtgagagctgaaggtgctgcaccaaatccagtagagttaaaagtagaaaatggtaagataatcgcaaaatatccagagattacggatacaaaagagcgaagcattgcctttaaagtgaaagtaaaagaagaggcaaaagcgggagaaacgattgttaataaagcggttgtgagtgagccaaatggacaaactgagcatccagaggaaaagattacgccggattataaatacggtaaagtggatgtagaaaaaagcgtaacgaatcaaacaccaaaactaggagaagaagtggaataccgaattacattttataatacggtagaaaacggaaaactagaaaaggtgctagtagaagatacactacctaaaggtgttgaatacgtgaaagatagtttgaaagctgaaggtataaaaccagagccagtagaactaaaagtggaagatggcaaagtaatggccaagtatccagaaattacggatacagaaaaaagaagtattgtttttaaagtgaaagtaaaagattcggcaaaagtaggggaggcaatcgtaaataaagcaattgcaaaagatccgaaaaatgagcctgttgaatcaaaggttgttattacaccgcaaagtaaaaaaggtgaaattgctgctacaaaggtagttaataataagaagccaaagttaggcgaagaaatcgagtaccgcattagttttcataatacggttgagaacggaaaactagaaaaggtgcgagtggaagatacaattccaaaaggtcttgaatatgtagaaaatagcatcaaggccgaaggagaagcacctgaaccagtagaattagctgttgaaaatgggatagtcaaagctaagtatatcgatattatggatatgaaagaaagaagtatcgtctttaaagtaaaggtgaaggaagaagtaaaagtagataaagagattgtcaataaagcaattgttgatgatacgaaaaatccaccgattgaaccggaggaaagaattactccgcaacataaggatggaataattgattcgaagaagacagtagataatccatcaccaaaactaggagaagaagtagaataccgaattagctttaagaacacggtagaaaacggaaaactagaaaaggtaataatagaggatacaattcctaacggtttagagtatgtaaaaggcagtgaaaaggctgaaggtgataaaccagctccattaaagttaagtgtaaaagatggaaaagttattgctgaatacgacaatattacggatatgaaagaaagaagtattgtctttaaggtaaaggtgaaggaagaagcggaagtggggaaggaaatcatcaataaggcaattgttgatgatatgaaagatccgaaagaaccagaagcgaaaattacaccattacacaaagatggaaaaattaaagcgaagaaaatcgtaaataatgaaacaccgaagttaggagaagaagtagaataccgaattagtatgaaaaatacggtaaagaacggaaagctaacagacgtgacagtagaggatactttaccagaaggtttagagtatgtagaaaatagtttgaaagcaaaaggtgccggaatagattcagtagagctgaaatttgaaaacggtaaagtaatggcaaaatatccagaaattacggatacagaagaaagaagtatcgtttttaaagtgaaagtaaaagaagaagtaaaagtcggtaaaaaaatcattaataaagcaactattgatgattcgcaaaataagccagttaatccgacagcggaaattactcctcagtataaagatggaaaacttgaagcaaaaaagatagtaaataatgaaacgccgaagttaagagaagaagtggaataccgaattagctttaaaaatacggtagaacatggaaagctaacagaggtgaaaatagaagatgatttaccaaatggattagagtatgtgaaagatagtttaaaagtagaaggttctaagccagatccagtggaattaaaatttgaaaacggtaaggtaatggcaaagtatcctgagattacagatacaaaagagagaagtattacctttaaagtgaaagtaaaaggtaaagtgagcgattcaattgttaatgaagcgattgtgagcgatacgaaacatccgccagaaacaccgacagcagaaattattccgcaacataaagacggaaaagtgaaagcgaagaagacggtaaataatgaaacgccgaagttaggagaagaagtagaataccgaattagttttaaaaacacggtagaagacggaaaactagcagaggtaaaaatagaagatactttaccagaaggtttagagtatgtagaaaacagtgtgaaagcagaagatactaagccggatccagtagaattgaaaatggaaaatggtaaggtaatggcgaagtatccagagattacggacacagaagaaagaagtatcacttttaaagtgaaagtaaaggaagaagtgaaagtcggtaaaaaaatcgttaacaaagcaattgttgatgatacgaaaaatgaaccagaaacaccgacggcagaaattactccgcagcataaagacggaaaagtggaagcgaagaagacggtaaataatgaaacgccgaagttaggagaagaagtagaataccgaattagttttaaaaacacggtagaaaacggaaattcacgatccgttgtcgcatactctaaaatacaccccatcggacaagcaaatgcacatttcttctacatatttaaattggctttttggtacttccttatttcgttttccaaatcggtgataccccatcaccataaatatatttctctccgataatttcttacagatataccctgtaaaatagcctgcatcaagagctactgcttccactttaaatccgaatttatcaatttgagcttgtagacgcgctaaatatggctcggaatctgccatatttccagccgttaaataagtatctgtaataatattgtacttcgcatcagtcgtacgatggtctaaagaaatgaaaaccgttcggttttccatctctcattaaaaatccactatctggatccgtagtacttatacgagtttttttagtgggagtatcactttcctttctgggttttaattctttttttcgtgtacctcacgatcttcaattaccgcagcttctagttcgtctatgtaaaaattttccttttcttttttatatttatatacaaacttatttttattagcattggccttaatgtgcgtagaatctgtcatcagcgcacgtcctcccaccatccggtactctgtcgcttgcctcacaatctcatcaaaaatttcttagaaaatatttgtatgaataaagcgagtacgacgattccaactgattgtagaatgatctggaatagtatctgatagagaaaaccctaaaaaccaacggtaggcgatattcgttttaatctctttttccaattgacgctccgaacgaataccgtaagaatatccaataaacatcattttaaataaaacgataggatggattgacggacgtccattgttttcacagtaataagggcgtaacttcccttcaataaaatcaaaactaattgtcgcttcaatcgcacgaaggaaatgatcttgtggaaccaactcttctacagaaacagatacacgttcatcacgatgattttttaaagcacccatcataaaaagaggttcagacacaaaaacaggctgtggagaagactttctccacagcctgaagataaacgaaaaaaagttctactcctattgagtagaactttttttcgtttatctcggtaaataattaagtaactgtaatatttctcttttaaattttggagttgcttgttttagtaatgatggtacttctctaaagtgatttattagggctttgttaatttttgtagagtaatcttttttatctcctgtaagtatatctactatatctttttttaatggattactaactttcccccacaaaaattctgattcctgaaaatgcttattaataaaaattttgacttgattaataaaagggtcatttttttgctgtatagcgtcttgtaactgcaatattgatatgtcataattttgagttacttgtttttccttcacatgacttatattctcagccgcacttacacttgatccgaaagcacctaaaccactaaccccaattacacctgccaaagcaatacttgtacattgttttactaatgatttcgatttaataactttcataacgcttcccccatttataatttagattttcttacagttaaattttaccatgttttttcacctgattaactgttaaatgttacaataaaacgaattattataataattatatattcataaaataatgcaattaactttttcaattacatgtccatttttagcaagttgatacttttcgttatatcccttttactacgaccatttctctttgcacaaattcattcaaaagattggactgattacacctttacttttttaaacagagcgagaatataattaattgcatagcttttgaatgcaactgttaaacaaaataataagatgagtagactgacgcccattatttccacaataatacggacatccccctcttcaatcaaatttggtgcggtttttattgtacaaaactaatacacaattcccctatatttttcatataaatttccataagaaatctctcctgttcctctctttaacacacaaaaacaaattattccaaaaaaataaggatgtggaaaataccttctccacatccttgaaaaccgtagcttgatttcaaactacctctttaagttgaactatccccactttcacttcgtttagaagtgggggattcctaagtaaagggttctatcgaactctaattgattaggctatctccgcagtccttgcggttagaagccttatcgcttcatgctttagattgatacttgcgttaatatccctatcatgatgtgtttgacatgaagggcaaacccatgtacgtaggtttagattcttaacgtctttattttgatatccacaacaagaacatagttggctggaagcaaatgttttcgatacgacaatgacttgttttccgtaccattttgctttgtattctaacatggttcgaaactgtgaccaggatacttcactaattgcttttgctaacttatgattctttaacatattcgatacttgcaaatcctctataccgataacatcgtggtttttgatgatttcagttgaaattttgtccaagtaatcttttctagagtttgatatgtattcatgaattctagctacctttactcgttgtttattccaacgagaagatcctttcattcttctagaaaggacacgctgtgctttcgccaatttctcttctaatactcgaaaaaattctgggtttttataagttgttccatctgacataatggcgaaattttttagtcctacatccattccaatgtaagaacttgttttcggaagttcttgtacttctgtttcgactaacaatgatacaaagtatctgccagaaggattccgtctaactgtagcatttacaatacgtcccgttatttcacgacttttggcaaatcgaacaagacctagttttggcaattttattttgtttcctacaacggcaatgttttcatttgtttgttttgtggtatacgattgtacgttattcttcttatatctaaagcgcggggcgctgtttgttttttgaaaaagcgtgtatacgcatccgcaaggttgcgaacagacgactgaatcgcaatactgtccacttcttttagccaaacaaactctttcttcatggcaggaagcttggcagagcatgtaccatatgtcaaaccttttcctgtctctttaaatgcgtgatcccatagggataggaaatgattgaatacaaaacgagaacaacctatcgttttgttaattagaattgcttgtgcttgatttggatagatacgaaacttataggctttattaattatcatttaattcacctccatttcggtatatgactattatacaccaaacgtacattcgatggatagtgaagtaacaatttatgtatgtcgaacaattaagatggctccttgccatcccttgttcaaagccaattcatctcccacctactcacttcgcgttccttgaggaaggagtcttcttggctaaaatgataaagtctgtaaagcttaaacttagaccaaaaacaaacttaattatatctaaaaatcacctattttataaactcatcaccattattattaaattcaaaatataaccccaaaaatttttctaatatttccgatttattgtcttttcgccaagcaagtgacgcctcaatttcagtatttatatcctcaactttccgttgtattaatccatttaatggattaattgatgaaggtaataatgctacccccatcccatttgcgactaatgctgaaaccgtttgtagatcatttgcctggacggttattttcggtgcgaaaccaacattttgaaacaggttcataaacgtatcataataaaatggcgccgctgatctagttgccataataaaaggttcattttgcaaatcatgaatataaattgattgtttgagcgcaagaggatgtttttcaggaataatagccttaaatgacacctttttgactggccttacatgtattttactactacttattggtgcagctaaaattcctatatcaatttttttttcaattaaatttttaacttgaataggtgtactaagttgttgtaatacgattccaactttaggatatctttcccggtatctttgaatagtttggataagatcttgtactgatccactgaatcctattacaagttcaccttcagtcccggtagaagttaatcttgtgctgatgcatgcttgttcaacttgatcaaggatttgataagctttatccagaaatacctgcccagcattagttaactccacatgccgttttgtcctattaaataatttagcaccaatttcctcttctaattctttaatttgcttactaagaggtggttgggcaatatgtaatttttccgcagctcgactaaagttcagttcctctgcaagaaccagaaaatatcgaatgtgtcttaattccatttatcattcctcctccctagtacttatacctaaaaggtattaataagacactttttaggtatttctattaattattaattttgtttaatattaagtcaaggtaaaaacattactattagaatgggtgatagcataaattacttccaataagcagataacctattattagtttttgaacctaatcaaatgctttttattttaattacctctaaagttttgagataagtgaaaattttggttctttcattgcagcactttcctttaatctcttcctaatcccccacaaagttttaagcagtggtattagtggaattgcaatcattattggaattttaacaccctttaatactggatcagttaatttccttttaaatttacttatcataatattaggttatattagacttgaaaaaaattcatagggtatacaattttatcagttatcacattttcgacagcattatatgctattccaatacatgtagtgacaaacgacgtactcctttcttcattgtttggtggcgttattgctggtataggtattggacttgtattcaattgcaatgggtcaacaggtggatttgatattatcggtatattgctttcacgaaaaaaagatattcagcttggaaaattcctaatcgtacttaatactattgtcgttattatctctggatttttcttcaattgggatattgccttatacagtttagtatctatttttattacagggaaagtcatagatatgattcacacaaaacaccaaaaaattactctaatgattgtaacaactcatgtagaaaaaatgaaagaaaactttctttctaactttgcacatggggtaactttattaagtgagaaaggggcatactcaaatgaaaaaaaatatatattaatgactgtaatctcacgagtagagctagctagaataaaaactataatttctgaagtcgatccacatgcttttgtaaatattacagaatcaacagaggtattagggctatttagaaaaggataaattagaaaataaaagaaatgcgtataatcactttcaaaaattctgtacaatcactttcaacatttattagtaccgacctacattcttctctttaatatactaaccattgtttgtgtttatataaaaaccactttgaactactcaccacttaatattcttacagactttttgaagtgggagattcctgcgaacaccgatgtatccaccggttatcttagcaggctatgcccgtagtccctacggtgaaaacataagtatcttatacgttgactcaccacgcttcctactttagcttggttttcgcaacttcagtaaacgtggggcgaaagaacgttgaagattttacggttgcaacgtttttctacaaccaacctcatatcttcagttttcaaagagcaatctgtacaagtctatggtagcaaacatgttggcttataccaaccgacattcatctcccacctaaaattggtgtttcacaccttaacacttttgaggaaggagtcttctgtcggaaaacgataaaacattgagtatagttcagggatgattaggagaagatgtagtaagcgaaaaataatatagttttttatttaaataaattattaatttacttttaaattgaggatgataattatatgaaaaagaaaacggcattacttaattgcactattataaacggcgacatgaatcgagaaattgaaaaagatatggttattctagttaataatcttggtattatagaaaaaattgaaaaccgtcaaaatataattattcctaaggaatatgaacaaattgatataaaaaatcagtttgttatgcccggactcataaatgcacatgcacatttattttctgatggaagccctacaggactatcttttagtgaagaagtattaaattttggaattaagttattagatacaaaattaggaaagaaatttatttacaatagaatgaaaaaaaatgctctagtctcatttcaatctggtataactacacttcgctctgttggcgaatttttctatcaagatgtgaaattgcgtgatgatatacaaaatgaaaaattgattggtccagacctaatagtttccggtttctttattagtgccacaggtgggcatggggcaccatatttggccctagaaacagacggtccttgggagggtgtgaaaaatgtacgaaaaaatgtacgccaaggtgtagatttgatcaaaatttgtgtaacaggtggcgtcacagatgcaaagacaattggtgaagcaggaagaattcagttaaccgaagaagaagtatacgctatttgtaaagaagctcataaaattggcatgatggtagccgcacacgtagaaagtaccgaaggagttaggattgctttaaaaggtggtgtagatacaattgaacacggcgctacgatggatgaagaaatcatttctctttataagcaaaatccaaatgccttacgaggatatacgtcactgattccaacatttcaagctgcatacccctatacattactagacaggaacataacaaatatcaatgatgtactttttgaaaacgcaaaaatcgtgtatacaaatatgatgattagttttcaacaagcaattgataatgacattagtgtaggtgtaggaaatgatgcggcaatggcttatgtatcacactatgatctatggcgagaattggatcatatgattcgttttggtggcatcaatgaaaagaaagcacttcatttggttacaaagagtaattcagaaattttaggtattagtgaaaaagtaggtacgatagatgtaggaaaaaaagccaatttattagtattacctgatgatcctataaagaacatcaaaaatttatcaaaaataaatttagtaataaaaaatggtgttttatttgaggatttaaacataaaaaagaacgaaaaattggataatatattggatttaatttaaaaggattttcttttccttaaaaacaagatatcatatggatttcgttttccaaatttatgatattgtaaaataatatgtttcatcaaggagctgacgcttaaacatctaaacacaaatcgatcggtttgtcatgagagtggcgatgtcacaccaccaacttgcacgtcagcgataccagaaatggaattcgcctttgttagcaagaatcccaatgatgttagtcagcttgcccctttagggggaagtgtaaaatgtgcaatgtcagccacattaaataaaatatgttctcccatttttcatttaattattcttatatatattaatctaaaaatcttctccttatttctggcggaggtagttgacaagtatttcgttttccaaataacttatatcgatttttggagaatttatcatataaaaaattacgaataaactttggaattaataatagaaaaactgctagcttccaaggataatccaactctttacaaatatttattacagcatctgatttaatataatatttactatgtttaattaagactatactttctatgtttacatctatattatatcgttctagtaattctcttccgacatcccctctaagtgaggcgtattgaaagttaccaatagtgtctcttttaataataaattgtacgctttggttacaaaaattacactctccatcaaataatataatatttcccatataggtctcctttctgtatccaatacgacagtaaaattataaaattgacatcaatacagatttattatccgatacttcacctattcaaaactataaaaacagttgtcaactaaacatatgttaacaactgtttcatttattatctcaaccgacttaaactcatttgtattgtttgccaaaaattagaaattaaagatttacaacgatatcgtgtaccaataaatcattagataggttatcaccattcatagatttaccccatgtattaacagctgctgtagctaaatacactgcagcgccagcaacatatactgcacctgcagctacttgagccactactgcagcgtaataaattgcaactaatccaagaactgcacaacgcccagttccagtcccatcttcagccacttctaggctagccgatgaaacgcccatatctttagtaatatctgttaaaatttctccacctttatttaaggctttttcaattttttgaggattattagaataaaccgcagcttctaactctgctagataagaagcatctttttctttaacttttcccactaaatcattagcttgtttttccatctcaggagtatttgtagcttttcttaactccttagaatagaaattaggtaatttttctgccacttttccttgtccaaagaataatcctttaaataattcttcaccagaaaaaacttttacacttgcctctgttacagcggctttagcctgcatacttccttgaaacattacgcccattaaaagagcaaaactcatcaatgatgctacaattttcttcattttatttctccctttttatagaataagtcggtgataaccactattaagatacaaattttttcttatctaaaatgtccttttcacttttagtcttaagagaatttaactttgatataaatttaaattctctatttaatggataataggacaaaattaaacctgcacacataattatcgaaaagctatgtaatcctaaaactatagcaataccagcatgtaataacacacctgagtaaagatatattttccaatatttatttgaaccaattagagaagctgctaaaaacagttctataattgtagtaccccaagttatgaaaaaaacaaaaggtgatgccagtaatggatttataagattcgctaaggtgctattcaaccccagcataggatcactaaaatagtaatatactgctgttccatctagccattcaggattcttcaatctaataattgctgcttggaagtagatgaaagacatttgtatctttacagcaactaaaaagactaaagatattattctaaaatgcaattgagaattggatgttgtttcttttaaaccagtctcccaatgccattttctcttatctaataatgtgactgggattagtaacaaagtcagcacagttgcgacttgttcaccgccatcaagagttatagctgtattttgaattgaagacgcaacccaccaatgtaaaacacctgtgtaccttggtctccatccagaagcaactaatagtaaaatcaaaactgctaaccacttaaatagccctaaatatgaaccagaagctaggcaaaatatactaattgaataaattgagcatgctggaaattcttctacccccgcaacaggcctgaataatgtagaaacatcattaaaaattaaagtaactaaggtagataaggctattaacgacctggctactccataaacactagtccaaggattattagaaatcgcccaattataagcaaaactatttatttttttgaacatattgattccacctttacaaattccgaagacatttctgaaggcgatgtaattcctgcccaggcccaaggtactacttttcttgttactagtgtataatccccacataaaattggtttaggtgttggatttttgaccttcactctttcatgtgtttttttaacacatatatcaatatcttcgtcacatttattgaatttttctttttgtacttgtgccactagtaatcccatttcaatcccctgtgatctaccaccacgatttataccaaatgcatttttgatagtgttatttggccaacccacagcagattctccattctcatctaaaataaatgtataatcatcacgaggtggcttactaaaaaacccccatccttgtgggaaaattttcattacagtaaaactctttaaattacttataggatttttaggtaagctattttgagatcccatcagaaataaaataaaaataaaaattcctgttaaaacaagcgtagaaccgtataaccgtttcatatacccctccaaatttaataactataataagaacaattaattaagtagctaattaattaattgatacaacattgtaactcttttaatttttatatacagattatttgctacacactgaatgatatctttagacacaaaatttcacaaatttatcacaaatagtatattaattttataaaatattatgttttacaattactaagcctaatttccccacactaaacaaactgcatctaaaataaattacactattggatataatttccttggaagtatggtgatttaattcacatttttttaaaaattaatacattttttcataaaatccaaattatagttttctacgctattaattgtaaaattaatagccctttcatttcacaaaaaaagatgacctattattatagatcatcttttgagttctttatattattttacttgtaatcaactttgtatatttttattctcaattttcctaaaaaatatatatgaagaaaacacagatattaaagcagcaattgccacaagactaatcatacttaaaattacaaatttcggggttaaaattgataatagtattatcattaaacctgtaataaaaaagatttttgcagagaatcgattagttaatctccatacttccttattctttaatgtccaaggggttcttattccgtatatataattttgttctactcgctgcataaagttagataaaaccataatgaatataccagttgctatacccactactaattcaaaagtaatagtatatccaaactcagtacttacaattactaaatgaataatacataacaacattaacattgcattagaaatgattcttaaatcaagttgattttctaggtttccctcagttaataatgtatttttcactaatatattaaatattacatttgaaataagcattatcgtgggcataatgcttagaatccatatcttctcatcccctaatttaaaataagatatgaaacttaccactaaactaatcataataataagatatgaacatgtttttttcctcattatttattttcctccccgattttaatacttataagccaattcaaaatatcctgaacaacggttgtatttaatgtgtaatagacatacttcccttcttttcgatttttaactaaatttgattgtttcagaatgttaagatgttgagaaatactgggctttgacatattgaaatgagaagctatttctccggcagtaagatctctctcctttaacaaatctaatattttccttcttgttggatctgctaaagctttaaaaagatcattcaataaaaatcctccccccaataacatttaagtatttacttaaatgttatgtgtaagaataataaaaatcaagtaattattaaatttaatataacaatgtagtatttttacattcatggtgcataaatcttaaactattctttaacattgctatatctagactcctggtaccacaattgtaaaatattagttacatatttcacaattgtttttgacaaatatgaatacaattactaattcaatagaatatttgtgtctattgaattagtatgtataacttgaatcgtataaaagacattaaaaatatacaatcaaaagtaaatacaataaataaagtaatggaaatgaattattttcttgatattttgatacatttttataaaatgacataaatcaaaaaaagaattttcataaattctttttattcccttgttgtaagcgctttacatttatgataccatcgtatttataagatagatggtaataagtcttgaagtagttctttacttaagacgcgtgtaaacgtacggctaaatcataaaaataggccataggtccaataaaatatgggctatcttataaattaatcaatggaaatttcatcgctaaaaatactgtgaactcagatataacagctttttgttatgtccttaacaaagttttacaattcagcgggaaaattctcgaaatttaactcatccaatttaataagctaaattttattctgtatccagctacgagacgtgagcaaaagaattctaccaacaaaaccgagctaagtaattaaagatatctaaaattttatctttatactgtctatagttgataacgtatttccaaacaatctgaaaccttttttgatttttaaatgtataaacgaattacttaagacttatttacatagcctctgaatgaattcttcaaatatttatttggatataaatcattaatcattgcgtatggacttccattccaatatttcattaatggtgtccataacctatgactttttatccatctaattgtatatttttgtagtaattgttcatctgttaacttttctctttcttcaattgtccaccgtaatgcatctagtgctttttcctttgtccaaaaaccattaggagtcatcttaaattcccattccttaaattgattgggatataaatcattaatcattgcatacgggctatcctcccaacataattgacaagcgcctttcaatccagattgaattagccattttcccccgtaaatatttctcaattcttccagatctaatttttctttttcttcaattgtccattttaatgcttgtaatgctttttctttcgtccaaaatttattaggggatttagtaaattgccattccttaaatacattcggatataaatcattaatcatcgcatatggactcccatcccaaaatacccttaatggcgtacttagtttttgttccttcaaccacttttgcccataaattcgtaaaattttttttggtaataatttttctttttcttcaattgtccattttaataattgtaaagccttatttttcgtccaaaaatttaatggagtcattttgaattcccattccttaaattgattagggtataaatcattaatcattgcatacggactattttcatatctatgctgcaatactccacgtaatcgatattttgcaattaaagagacattccaattttgctttatctcttcttcgttccaatttaaaatttcggttaataaatatcttgttactcttttagccatttcattattctcatcccacctccaagtattggatgggaatctacttctttttccatccaatatctcctgatagatttcttctatagtaactgcttttatctgcatttcatactcttcccctcacactatataaaaatttttatttctttatattaagattatacaaatataaaaactaattacaataattacttatattaaaactataattcctaatgaggatgatcacatcaatatccagttaaaaaaatcataagttctttctccaaaattataggaaatgatgtctttatatcaccattttttgtatataataattagaactattctctcaagaaattcaaaacttattaactctaaattttttacaagctcttccaggagatatgaattttatgtaacaaaaccttaaatacctagccggggtttagtcgttttatatgtgtagactaaaacctcttcaatctaagtatgtagctgtttagaagtaccaacgatttaataccacatctatatactctttatacaaaggttagccaaagtaatataaaactaagtgaatctctttcccatacacctctaataccagcatatccatacctatatttttataattttcaagttccagatgcatacacatctactaatcctcatgataggagatgtagtcagtcctaaagctgtaataaaaatcccattagagtatgactaattaattgaaaatttttccggcgtgaaattcaaagaattatttatatctaactcttaaaataaacaaaaaaaaagatgagttatatattcttcatttaatatattttcgtttactcgaatttaagtctatctaaaataaagataaatattatttatcaatctttaaattaccaacaatatatataaatttgaaacagttatatttaaaacaaaatttgtacaatcgagtctaatatatatttgaaaaaccttttgaaacaattaaatgatatatataaggggcaacaagaaactacatactattagtaacttcttttcaaaagttttggacataatgatctcgtaaatcaatttgttttttgatcatgtgcatagcttcgatgccacttaaaattaaagtagctgtacgaagtaacttcaatcctaacatagaacgaactcgcttcttgataaaacgatgatcttgctccactacattattccagtacttctgttgtctaaattacataccgacaggcatgtttttctctttttctactgttcaattgctataggataagccggattcttatccaccgtaatgatgcgaggcttagaaacatgaaaaggccaaaaagctttcttgaagaaacgctttgcattctttgtatctcttgtttcactgaaatacaaatcaattgtgttgtattcagaatccactgcacgaatagatacatccattttgatatatgtttcatcgactctccgggagtcatttgttgtcttaaagtgactccatactctttcatcattccgacccatattgatgaacctacgcataatggttatatgagccatcgatatgccacgctctttcatcagctgcttaccaaaaatggtttgtatagaatgcgacattacacaatgatgtgtactcttaatttattcaccaatccgtgacttaattggattcatgacaaagatattatatgttcgtgcaatttcataaacgtgctgactatcataagcagcatctgcaacggaaacaacgcattttggttttgcataccttaaagcaatgcaggaaccattttacgttcgctgttgtaaatgcatacgacatctggtgtagaacagacatgagctttatatttcttataccaaccataacgagtagactattctttgtttgagaatcgtataaactcctccgtaaggccatactatcgattaaaacacagggaatcaaacctaaattcacctcttgaagagtttgtttatgaatcaatggaataccttcgttttgaaaccaagttacctacacgtgaaaaagtagagatacgaggaacaaaaggaaagtcacaaaatacaagaaataaaggatattgatgcaaaagacaggttaatttacgtaaagtttttctataaatgagtggacgacctgtaataggcggaacttctccaatgattaaactttctacatacgcaaataaaatttgtaaaatggatttttttgatcaaaattggttatcatactagtaaatacatcctttccagtgatagtttgggttactatcattcttccaggaaaacggatttttttatgcattcatttttggatatttatgagttctgcaacacctaaattttattaaatatcatgatttgcttaaaaatttgaagcgtgcgaaactagagcgtcgtttagaatcccaattgaaacaatatataaagtacaaattacttatcattgctgaaatcagatatttaccaattgatccggaggatgcaaaattatttttcaattcattgatatgcggtatgaaaagcgtagtaccatcttaaccacgaaagtaaatttcaaatcatgagacgaaatttttcaagatcctaccatgctaacaaccgtttcttacatcatgccacggttgttagcatggtagggtaatcgtatcgaattaaagatcattttagtaaagaaaatgattaaatttgtacacgcttaaacaagtgaaaatgtacattttaatccttacatttatataaaaaaattatgacaaataatttttttgtatataactcagcatttgactatgttaattaaacttaatattggtatatgagtccaaaaagaaaattaatctaattgcctaagactacttatgtacaattgtattatttactttagcaccttgaataagctctctttttatgattttgtaaaaggattccacaaatgcatcgtcataaagggttcttttctacagacacttgaaaaagcccattctttttgaatgtagtttgaaaatacaacttgtatattaagactcttggtctttatgaataattccccctttttcttcgacttaagggcctctactccttttggttgttgttgagtgcgtattttctaataagcccagatgaagaaatattaaaaataactgccgtttcgtttggaacggcttattttcaatcctataattgtgtgacacgttcctaactgaaaatgttaggcgctgattcgatattcagcagaactattatctaggtgccacggaaactgtcatgccctgttctaggagaggtagttagaaaaatgctaaacttttttagtaactcgctggctacttactctccctcacgtacggtgtaaagtgggggataagggggggataacgtcaaaaccttacctatcactattaatactatcttttatattctcacttccatctttgataatgtattacagcatttgtttttcttctagagtaaatttaattataaagaaactataaccccaattgttagactgtttttaacaattggggtgcatttaatatttattatacctctgtcattataatttattaatacaagtaattatttctcatttttccaataataccccattattttagctgacttcgcaaagaaatctatatatacctatttttttgaagaaaaagcttccatttttaatgtttttattccttcttttaatgtaaacgcatctgctcttaatgttttccaactatctttcgctgcattcaggttaggttttaagaatttaaatttattttgatctgctttttgggatgctttatcaatatgattaagcactcctgaatattgagaatctaaatcatgccattgtgctgacatataggtaagagcattaatagctgatccaattgcattttgcatttcagtaatattattatacgcaactccaactacacgatttaatgttattttatagtctacggtttggcgtaattgcactaataacggctctaacgtacctaaattatttcttgctacccctatcatcacacctccagcaatccatgtagggattgaaggatatgatacagttattattccatccgattctacttgtttaaaatgtcttatttgctctaaaacatcatttaggcgtttttcatcttcatctattccagatgcttgattttttaaaatcgattgcaagaaaataccctatagaatagacttttttcaagtgtctattctatagggtacattttatatgagcagcctctttttcttataattagaactggattttcttctctaagaaaccttttagttcgctaattggcatacgaacttgttccattgtgtcacggtcacgtactgtaacagctttgtcttcaactgagtcgaagtcgtatgtgatacagaatggtgtaccgatttcgtcttgacgacggtaacgtttaccgatagaaccagtttcatcaaagtctaccatgaagtctttagctaattctgcgaatacttcagtagcaccttcagatagctttttagataatggtaagatagctgctttgtatggtgctaaagcagggtggaaacgaagaactgtacgagaatcgttttctaattgctcttcttcatatgcatcacataagaatgctaatgttacgcggtctgcgcctaaagatggctcgatgcagtatggtacgtaacgctcattcgtttgtggatcgatatagttaaagtcttcgtttgagtgttccatgtgacgttttaagtcgaagtctgtacgagatgcaacgccccaaagttcgccccaaccgaatgggaatttgaattcaatgtcagttgttgcattactgtagtgagataactcttcttcaccgtggtcacgaagacgcatgctctcttcagacataccaagtgaaagtaaccagtttttacaagtttcacgccagaatgcgaaccactctaaatcttcaccaggcttacagaagaattcaagttccatttgttcaaattcacgtgtacggaatgtgaagttaccaggtgtgatttcgttacggaaactcttaccgatttggccgataccaaatggaagctttttacgcatagagcgttgaacgtttttgaagtttacgaaaataccttgtgctgtttcaggacgaaggaagatttcgtttgtgctagactctgtaacaccttggaatgttttgaacattaagttgaactgacggatttcagtaaattcttcactaccgcaatcaggacattttacttcatgttctttcattaagtcagccatttggtcgaaagtaagaccgtcaacaaccatttcgatgccttttgcatctaaagcatcctcaattaatttgtcagcacggtgacgagctttacattttttacagtcgatcattggatcgttgaagttaccaacgtgaccagaagcgatccaagttttagggttcattaaaatagctgcgtctaaaccaacgttgtgtggagattcttgaatgaattttttccaccaagcttttttaacattattttttaattcgattccaagtggaccgtaatcccaagtgtttgcaagaccaccgtaaatttcagaaccagggaaaacaaaaccgcgatgtttcgctaagtttacaacttgttccattgaatacataagaaaatcctccttttgaaagttaacgtattggcgatgacatactctgatactttggaaacgggcagtatatgttaaaaagaacataaaaaaacgctcatcccaaggcttatttgcctagggacgagcgtttgcccgcggttccaccctagttgatacacaaaaggtgcatccactttatcatgtattgctcaggactgccgtttccttgcggcttcaggctttcactatccctgaatcgctttttatgcaagtacttataagtccgtcatcgctacttatattaataataatgaacatattctaacacgttcttttttaaatctcaatagaggaacgcgtctatctatgatagagtctcgcctattttttcgttatttattcggtaattttgtttaatatgcttaattgcttcgcgcttacttaatggagcgagctcattgttttgcacgtattcccaaactacatccggatttgtttttgcatattcacgaaggacccagccaattgctttttgaatgaaaaattcttttgaagaatgtagttgtccaataatccagaaaagaagttcttcatccatcttttgtttatatttgagttggaataaaatagtggcacgttgtaaccaaatgttatctgatgcaatccattttgggatataggcagaaatcaattctggatgttgtaaaaagatattacctaaaaatgtaggtacgatgctatcgacagtgtcccaccaagattttgttacaatcaattcttctaagaaggggatatgtgtttcgtttatatgctttttatatttttgcataatatcaagtgcagccgcttggaattcacgttctggtaagtcccaaagttcacgtacgataatttggaagtctcttttatctgggagagtatgtatttgaatgatgtcttttaataattggtgtctttccggtgtttgaatacctagaaatgggaagtgatttttcatataacgagccataggttctgctttttcaagattttgatgagctgtaaaatgctcttgtaatgcttttacaaatggatgcatacgtgtttctcctctcttattctctttcttctcttattatacaaagagtttggataaattttaaaacataacttgcaatgtaatgaaatatgttgaaagtagagaggagaggataagatggaggatcaaggcgtactagcaggtttctttgctcttagttttgcgtttattcttgttatattgatttgggcaattatttcatatttgttaacggcttttgcactttattcgatggcgaaaaatgatggtgcaacggacggggtgcttgcgtttattccgtttttgaatagtaagacgtggggggacttagcgaaagataaattaccagattttttgaaagaagaagcagggtggaaagtattcggcatatatgttgcatgtttcatttttaatttcgtaccaattataagtttactagcaacagctgtatcgattgtattgtccatttatcttatctacgctattttagacagatacggaacgaactctatattatttacgattattcatgtaatcacattttcggtgttcttaccgattcacttatttattattcgaaatgaaccggtgagatataaagagtagatttttcatttttgttgataagtagctataagtaaaaaagcgccctgattatcagagcgctttttctactacataaggtagcgtaaataaatataaatgtgagaaatgattaatgaaacgatcataattgggaaaccgacttttaggaagtccatgtaactaaatttatgtccttcgcggctcgcgatacctgcaacgattacgttagcagaagctccgattaatgttccgtttccgcccagacaagcacctagtgctaatgcccaccataatacatcgatttgtgcgtcagatggtgataagcctagcccaactgccatatcgttaataagtggaatcattgttgcgacgaatgggatgttatcaattgttgcagaggcgataccagatacccataaaataaggatggatgcgtaagaaatatctccgcctgttataccaattactttttgagctaacattttgataagaccgatatcgataagtcctccaacaagtacgaataaccctgcgaagaagaagattgttacccactctacgcttgcaaatacttcttcaatttcatgctctttcacaccaattaacataagtacagtagcaccagttaaggcgataatagcggcatcgatatggaaaatagaatgagtcatgaaacctacaattgtaagtccaagtaccgttaaagattttttcattaatactgggtctttaatgtattgtttttcatctaagctcattaattttttaacttgtacaggatcggcaattaattgtttgcgatacatgaagtaaagtattatcgctgtaactgcaataataataattacaataggtgctagattcaataggaaagcattgaagtctaaatgcttatttgcagaaccaatcataatgttaggtggatcaccaattaatgttgctgttcctccaatgtttgaaaaaataatttcagaaagtaaataaggaacaggatttacttgcagtatgcgcgtaatagataaagtaactggaacaacaagaagtacagttgtaacgttatctaaaaatgcggagccaagcgcggtaagtaaggaaagtgaaattaaaattttaattggatttccttgtgccccttttgctgctttaatggcaacgtattggaagacacctgatttactcgtaatgttcaccaaaatcatcataccgatgagtagcgtaatcgttccccattcaatatgtttcgtaaaggcgttatgtaaatcgacgacccccacaattaccatgagtgctgcaccaagaagtgcgatgacagcgcgattaattttttcagaaataataatggcatatgtaattaaaaagactgcgatagcaaaataatactgccagttagcgagttcttgcgttgtttcgtgcaaaaatctcatctcctttcattcactttttcttagtgtgtcaaaaatgctctagaagaaacacacataacgtcattataaagtaggaaaatggcggatgtaaatgaaaggagagattttgtcatattttctgcataggtcattttttcttattttttaaaatatttgtgggcatttgacatatatataagatacatccaatctgaatatttaaaatggaattagcattcgagcttgttcgtgtaggagtgtcaaatagaaaggaatgacaaaaatgataaggaagggatcgtatggatgaacaacgatttttatttttagactttgagtttacgatgccccagcatagaaagaaaccgaaaggattttttccagagattattgaggtaggactcgtttcagttgctggctgtaaggtagaagatacgtattcatcacatgttaggccgaaaacatttccctctttaacggatcgatgtaagaagtttttaggaataaaacaagaagtcgtggataaagggatttcatttcctgaactcgttaagaagctttcagaatacgaaacgaaatgtaaaccgacaattgtaacgtggggaaatatggatatgaaagtgctgaagcataattgtgaaatggcagggatagcttttccattcttcggacagtgtcgtgatttatctcttgagtataagaagttttttggagaaagaaatcaaacaggattatggaaagcaattgaggcgtatggaaaagtagggacagggaagcatcattgtgcgcttgatgatgcaatgacgacgtacaacatttttaaactagtagaaaaagataaagagtatttagtaaaaccagcacctccaacattaggagaacttgttgatttttcaaaagtgttaaagaaagtgagcacacagtaacgaccaaattgcacattatgtaatttggtcgttttgttttttagagtttgtagtctttctttaactgttctaatgtttctagactacgctctgcaaaaggtgaatcatcttcagaaaatgaattcatttgagtttctaatgctaattttagtgaatctgtataatccggaatttctccttcatatttcttcaccatttgttctggaatgttcgtttgctcacgaaaagctaaagcacgtctttcgtggaaaaatggtacgtcagcttgttttacgttatgtaagtcaccttgcaccggatgttttaaaacagctaatgcttttacgacgtaactgccagggcggctatttgtaacctcaccaatgtattttcctgttttataaataccagtaacgatttcaccaatttcaaatgtttctctcatatttttcacctcaagtttatagtaaggaaagtgagggaaggagtcaaagaaatccttcgttttcagaacgccccttgagaatatggggaggttgcactataatttaaaataatataacagaaaattctgatgttttataaatcctataataaggagtgttctatatgatgcctttatattttccggaagataaaacagaatatattattccggggattgtttgcgttctatttattatcggtgctattgccacgtggcgcatgtttattcgtatatcaaaaagagaagcagaccgattacagaaagttgaagaaaaactattagctgaaaagaaacagtaactcatttttgtatgtttccttctatgctcggacaatctaagggcagaatatattttggagggaataaaatgaaaaaacggctttttttcagttgttgtttactatttctgatggcaggttgtgaccaaggaaagccgaaagaaattgacgtgaaattacataatgcttcaggtgatgaagtggggactgcgaaagtaactcagcaaacaagcggagtgaaaattaagattaaaggggaaggtttcacgccaggcccgcacggcatacatgtgcacgaaattggtgagtgtaaagcaccacgatttgaatcatctgggaatcattttaatcctgataataaaaagcatggactccttaatccgaagggtgcagaaaacggtgatttaccgaacgtagttgcagatggttctggaaagattaaagcagaaatcgatgcacctcacattacacttgaagaagggaaaacgacgattcatagaaaagatggagcgtctattattattacagaaaaccctgatgatggtatgacacaaccgacaggtaaatcaggggatcgaattgcttgtggcgtaattgtaaaaaaagcatcggatatgaagaaaaagtaaaagctaccgtgaatggtagctttctttgtgaaatgtaattgaaaatatatcagcgattattggaatatatcgactgtaactcaaattatatcggcgattattggaatatatcgactgtaacttgaaatatatcgatttaccgacaaaatatgacaaaggagtctgccccaagaatgattcgggacagactcctttcttattatgaaaacgtatgacgcagtctgtttaaaatttcttctaaaacagatcgtggacagccgatgttaattcgaatatgttcttcgccacctaacccgtatttctcaccaggttcaacgatgatttttcctttttcctcaagtagtgcggtacgctcgttttgagaaagctttagacgagaacaatcaatccataataaaaagctaccttctggcttcgttacggaaagagcaggtatgtgagttttaatatattcacaagcaaattgagcattatcttctatatataatcgaatttcgtttagccaatcattacattctgtataggcgctttgcatcgctgtataagcgaagatatttaacccgtggaagccttgtctatactggatggctgtaaaggcatgacggagcttttcgtttggaatgataatgatcgacgcttgtaatccagcgatattaaatgttttacttggagccatgcaagtgatagtgcgctctgctaattcttcagataaggaagcgaacggtgtatgtgtatggtctgcataaatgatatcggaatgaatttcatctgccacaacgattacgtcatatttagtacataacgatccgagctgcacaagttcctctttcgtccaaacgcgtccgattgggttatgagggctacaaagaagcaagagtttgatgccttgctgaaactgcttttctaaatgcttgaagtctatcacatatgtatcattttgtttctgtaatggactcacgcataactgcctgttgtttgttgtgaccatttcgaaaaatggaggataaataggtggttgtacgagaacagattcgttttctttgatgaaagcctgtatgctcgtactaagagctggaacgattccggcgctaaagacaatccattctttttgaatatcccagttgtattgttgttttgtccagttacaaataatatctccaatattttcgggaggaagtgtatagccaaaaatcggatgttcgattcgttgttttaaggcagtttgaattggttttggtacttcaaaatccatatcagcaatccaagcatggataagttcttcgtttttatatgtatcccattttatactatgcgttccacgtcgattgattgctttatgaaatagttgcataagtttgctcccttcttctgtaaaaccaataagttatgaaagttctctctcttcttatagaatagctgatgtgataggataaagaaaagtattaaaaagtgaaaaggcgggaagcgaatgggtacatatgaaaagatgatagaggttgtgaagaattgggatccgtttcaaatgggaccggagttttatgaaacagaagcgagcgatgttgtgagcgtcataagtgtgtttgacgatccaaaatatatcgcaaagaagattcaacatatatactttatgtcttttgaggaagtacctgcgcttgaaaaatgtgagaaattagctgtggaattacttgtaataaaagaaggcggaagctgttcattataggctgtcgggatttccgacagccttttttatattatcccgctatctgctgggtagtaagaccttcacctcaaaatttagcggaagcaaagaagttaggtggaggctgattaaagtttcattttattgcgcggaaaaagcgataatttcttcataaacatgttcaggcttttcttcaggtagtaaatgtcctgtattttcgtaagaaataaattttgaattcggtaaatctttgtgtagacgatgacctacatgtacagggacgacgcggtctttttcaccccaaatgagtaggataggtgtttcgattttttgtaattcagttgaagataagtcaccttcacggtctcgtatcatgcgagttaaagcgggaaatatacggtcgtcataaaaaggagcggagtaaccttttttcatttcatcgtcaattaatgagtgatcatgaacgacattcattaagttatgaacaatgccgcgccttataatccagttctttacgtataaatgaaagaacggtaaataagaagagtatagtaaaggtaaggttgcgcgcgctaaatagctcgagctacatagtaaaatcgtctttgaaatgagttcaggacgtatacggtttacatagagagaaatttgcccacccatagaatgcccaactaatacaatgtttgagagagataaatgttcaattaaatcaataataatcgttgctaaattgtgataagaatacttaaacagatgagacttatcactttttccgaacggtggcaaatcaagagcaatgactgttccttccttcgatagtaaaggaattagacggcggtaactgaatgaggaagataaaaagccgtgaacgagtatgaaagtaggacgttctgttttattatcatgttcatacaattcgtaatgaacagtagtgccgcgagtggaaaaagtgaaataaggacaagtatatttatgattcattttttgtcactccattgatttttgttcatatcatctccaaggaagaagaaaatatgttaacaaaaaaaggcaagatgacgatgtcatcttgcctttcgtttattcagtattacccgcgaacaatattaggcggtgtttttccttgtaaccctgcaactaaattttcagcggcggtcatggccatttgctgacgagtttttaatgttgcagatccgatatgtggtaaagtcacaacattttgtaatgataagagtggattatctttttgaatcggctcttgtgtaaatgtatcgatacctgctgcaaagattttcttttctgttaaagcatggattaacgctttttcatctactgttttgccgcgagaagcattaatgaagattgctgtgtctttcattaatgaaaattccttttctccgataaggtgatatgtttcatctgttaatggagtaagaagaacaataaagtcagactgattcagtagcgtctgtaaatcacaatatgtagcatcgaatttttgttcagcttcttctttacgacggcggttatagtaaagaacattcatatcaaatccgaattttgctcgttttgcaacggcttctccaattcggcccataccgataataccaattgtgctatggtgtacatctagtccgaagtgttcttttccgatttcagcgttccattcaccatttttcacgtaagaatcgagttcgcaaacgcggcgcccagctgatagcataagggcgaaaacgagatcagctactgtatcatctaatacgtatggtgtatttgttccgataacatttcggtttttcatcgcttgtaaatcaaaattatcgtaaccgacagaaatgttgctcactacttttaagttaggagctactgtcagtaattcttcattaatagcagatccgaaatttaataacccatctttatcttgtattttctctaatagaatatcacgaggtactttctcattttgatcccatttttcataatcacagtgttctgataaatagttttctacaaatgttggaactggttcagcaatataaacttttggtttcacggttccatcccctttcgctttatcccgcatttttccgctgattaaagtttcactttattttgacataattcaatagaaaaatcttcttttcaaacttgaaagggtatttgtataatttagacacaaacgaaaaggaaggatgatttatatggtgacagaaaaagaattagaattattagcttgtcttgaaaagagtagtcgattatctgtagatacattagcgaagctgttaaatatagaagtagaagaagtaaagaagatggttgcgagattagaaaatgaaaagattattgtggattatgtaacacatatcgattggacgaaagtgaaagaacatacaggtttaacggcaatgatcgatgtgaaagttacgccaaagcatggcgttggatttgatgcggttgctgagcaaatttatcgttattcagaagtgaaatccgtttatttaatgtcagggacatatgatctttctattacattagaagggaaaacgatgggggaagtagcgatgtttgtttctgagaaattagcaacaattgaatctgtcgtttctacaactactcatttcattttgaagaagtataaacatgagggtgttatttatgaaaaagacgatgatgataagcgaattgtggtgacaccatgaagcaatttgaactatctagatcagcagaatctttaaaaccatctggtattcgaaaattttttgatttagcagcaaatatgaaaggtgttatctccctcggggtaggagagccagattttgttaccccttggaatgtaaggcaagcatgtattcgttctttggaacaagggtatacgtcatatacagcaaatgcaggattattagagctccgtcaagaaatagcaaagtatctaaaaaaacaatttgcagtatcttatgacccaagtgatgaaatcattgttacagttggagcgagccaggcgttagatgtagcgatgcgcgccattataaatcctgatgatgaagtgctcattattgaaccaagcttcgtttcttatgcaccacttgtgacattagctggaggagttccggttcctgtggcgactactttagaaaacgagtttaaagtactaccagaacagattgaagcagttattacagcgaaaacaaaggcgattttgctttgttcaccaaataacccgacaggtgcaatgctaaataaatccgagcttgaagaaatagcagtgattgttgagaagtacaatctaattgtattatctgatgaaatttatgcagagcttgtatacgacgaagtatatacaagtttcgcgagtattaaaaatatgcgtgagcatacgattttaatttcgggattttcaaaagggtttgcgatgacaggatggcgtctcggtatgattgcagctcctgttcaattttcagaattaatgctcaaaatccatcagtattcaatgatgtgtgcaccgacgatgtctcagtttgcagcacttgaggcgttacgcgcagggaacgatgaagtgattcgaatgagagatagttataagaagcgtcgtaacttcatgacgaaatctttcaatgaaatgggcttaacgtgtcatgtgccaggcggagcattttatgttttcccttctatatcttcaacaggattatcttcagcggaatttgcagaacagttattgctggaagaaaaagtggctgttgtccctggtaccgtatttggcgaaagtggtgaaggttttattcgttgttcttatgcaacatcgcttgaacaacttatggaagcaatgaagagaatggaacggtttgtagagaataaaaaaaggacaaaacgtaatacgttttgtccataaaagggggggaatactagaaagccatgtgttagtagtctatcccaatattggataattatacttctttaagggaaatttttcatgaattttgaatgagttctgtcatagtggtataatttactaatataaggtatacgcattctagataacgttatctagaatgcgtactaaccaatcggatatttaaaataaatatatctgctttgctctctataattgtagagagaatggtaaacgtatgggagtgtttcatatgtcagaacaatatacaacaggagtggttgtaacagggaaagtgactggaattcaagattacggtgcgtttgtagcgttagatgcagaaacacaagggcttgtgcatatatctgaaattacaaatggatatgtaaaggatattcatgactttttaaaggtcggcgatacagtagaagtaaaggtactttcaattgatgaagagcacagaaaaatgagtttatcgttaaaagcggcgaaaagaaaacaaggaaggattcttataccgaacccatctgaaaacggatttaatacgctgcgagaaaagttggcagaatggattgaagagtccgagttaacaaagtaaaagaggaacgcatatgagcgttcctcttttactttatcttatgatatatatttgcaaatatgattgcatgcaatcatattcgtatgtcggaggtgaaaggacatactgattatcgaatttcgtttgtttctgggtgcgtaccaagattttcagatggtttaaacagtaaaccaaggttgataagcccagatataccaacgatgccgtaaataatacgtgcaagagctgaattttgtccaccgaaaatggctgctactaagtcaaactggaaaaacccgattagtccccagttcacagcgccaattacagtaaagactaatgcgatacgttgtaaagtactcatgaaaaagccccccttaattgtgaagcatgagcaagcgatgagttaattaactcttttatagaatggggtagttatgttgtttttatacataaaaaatgtttgaaagaagatgtatatacatctataccgaaaaatgcgaatttttatgcaaaaaatgaactttttctaaaaaatatatattggttacgtttacaatgtttgaatcgcttgatttacaacttcagtttcgctaaagtgaatacagaaatacatatccataattggagggaaaaagatgagtacacatgtaacgttcgactattctaaagcgttatccttcatcggtgaacatgaaatcacttatttacgtgatgcagtgaaagtaacacatcacgcaatccacgaaaaaactggagctgggaacgatttccttgggtgggtagaccttccgcttcaatatgacaaagaagaatttgctcgcattcaaaaatgcgcagaaaaaattaaaaatgactctgacattttacttgttgtaggtatcggtggttcttacttaggagcacgtgcagcaatcgaaatgttaaaccattctttctacaacacgctttctaaagaacaacgtaaaactccacaagtgctatttgttggacaaaacattagctccacttacatgaaagatttaatggacgtattagaaggtaaagacttctctattaacgttatttccaaatcaggtacaacaacagagccagcactagcattccgtatcttccgtaagttattagaagaaaagtatggaaaagaagaagctcgcaaacgtatttatgcaactacagataaagcgcgtggtgcattaaaaacattagctgataacgaaggttacgaaacatttgttattccagatgatgttggaggtcgtttctctgtattaacgccagttggtttattaccaatcgcagtaagtggcttaaatattgaagagatgatgaaaggtgcagctgctggtcgtgatgacttcggaacatcagaactagaagaaaatccagcttaccaatatgcagtagttcgtaacgctttatacaataaaggaaaaacaattgaaatgcttgttaactatgaaccagcacttcaatacttcgctgagtggtggaaacagttatttggtgaaagtgaaggaaaagatcaaaaaggtattttcccatcttcagcaaacttctcaactgatttacactcattaggtcaatacgttcaagaaggtcgtcgtgacttatttgaaacagtccttaaagtaggcaaatctacacatgaactaacaatcgaatcagaagaaaacgatttagacggattaaactaccttgctggtgaaactgtagacttcgtaaacacaaaagcatacgaaggtacattacttgcacatagcgacgggggagtaccaaacttaatcgtcaatattcctgaattaaatgagtacacattcggttaccttgtatacttcttcgaaaaagcatgtgcgatgagcggctacttattaggcgtgaatccatttgaccaacctggagtagaagcatataagaaaaacatgtttgctttacttggtaaaccaggatttgaagaattaaaagcagaattagaagagcgtttaaaataataaaaagcgaccggattccggtcgctttttattattttatcgaaaagtccatcagtatattcaaactaaagtgggtatgctaaaggaaaagtctaggagggatgggcttgattccgattcaatcaaatttagaaggacgtacatatgcgttatataaattagaagagattatgaaaccacttggatatagcattggtggtaattgggattatgataaaggatgcttcgattacaaaatcgatgaagaagatgggtatcaatttttacgagtgccatttacagccattgatggagaactagatgtaccaggcgtaatagttcgtcttggaacgccgtatattctttcgcacgtatatcaagacgaactagatgataatgtgaatactttaacagctggaacaagtggaatggatcaatttgctgagccgaaagatccagatggagatgtgaaaagaaaatatatcaatattgggaaagtgctcatgcaagaattagagcgtcattttactaatggtgaataacaatgagtatgtcgctttcaatgagaacaaaggaatgaactggattaatcatatattgttcgtcgcgctttatacctagtaagagaatgttttgctttaaaagagtatagctacaattggcaaaagtttgtccggtgcaggacgatggaagcttcatcagttgtaatttattatcagagatttcgtcgtaaagtgaaaatagtacacctgaaatggaagggaataaaagagaagcggtaaatacatagctcgttaatttatttccttctataatttctgacgcgccagctctcgttgcattttgtatttgttcagaagtaagaagttcagcgatgcagtgaatgtttgggttgagcccttttgcagttaaaatatttaaaatggactgtgtatccgctaagctttcatttttttctttatccgctgttattaatatggtgtgtgccgttgcaatattagcctttaataaagtttgatcgtgatgcggacaaccttttataaattctaaatgatgaaatggttttggaagtaaagaaagtgtttcatcaattaaaacgatatcaaggtttggttgtaatacgtgcatttgctttacaacatgttttgcgcgctcattccagccaacgataatcatatgaccgttagaagtagcggcttcttcacctttaattttcatatattgtttactaatcatctcggtagcaaacagcaccatataataagaacaaaagccagttcctaataaaataatacttatacctattagttttcctatcgtcgtatggggagcaaagtcgccatatccaactgtaaaaatggtaacgattgaccaccaaattccgtcaaaccatgtagtgaaatgaaaaggttctaatctatgtataagaaaaccggaaaaagcagtcagtacaataataaaacaaattaaacgaaaaataatggaatcacgaaatgtatctactaaattcggacgggatttcaattgcctattcctccttactttgtaggactacattcattgttgccattatagaaaaaagaaaaactctctaattaaagagagtttgttttacgttacatactttccacttcagtttgttggacactttcaagatgctggagagcatagtaaacatcagcggtatgtcttttttgatcaatggacagtttaagatgtaaatagtgagaaccgttttctaatgttttaagcttcatattcttaacttttatatccatttcttttatttcttcaattacgattgggatattgtccatatttcgtacaacaagtttcacagcgatatcacgttgacgaaatgatctagggcctacatatttcattgcgagtggtataagttcgacactaatcataaggaaacacattccgaatatcgcttcaatatagaatccggccccaacagcaataccaataccagaagcaccccagatcatagcggcagtcgtgagccctgcaatgctatcgttgcctcttcttaaaattacgccagcacctaaaaaaccaattcctgatacaatttgagcggcaagtcgaagtggatccatattcatatgatcggtatgtggtaagttataagctgctttaatagaaacaatcgttaggaggcaactaataatagaaataactaaacacgtttttaaaccaagtggtttccgttttaattcgcgttctaaaccaatggcaaatcctaaaatagccgagagacctagtttgattaataaatcggtatagtccatatatattcctccttgtatgatatgctatatgaataaaacgcttattatagaaagaaacgtcttttgatagagtaactttatataaaatatatgtaggaattgctcatacatgaaagagatatttcgtttaagtatatgatataaaaaaagaaatgtgggcagttttaaaaaaagtttataaaaggtgttgcatttcatttttcaccatgatatattaataaccgtcgctgatgcggaaacgcagaaaacgacaaaaaagaaattgaaaaacttagttgacatcgaaaaacgaagatgttaacataaggaagtcgcaaatgagcgaccaagtagttctttgaaaactgaacgaaacaaacaacgtgaaacgtcaatttttattttagatgctagacaaactaaaaagctaaagaagaagaaaaagcaagagaaatagcaaaagctaaagaagaagagaaggcaagagaaatagcaaaagctaaagaagaagagaaggcaagagaaatagcaaaagctaaagaagaagaaaaagcaagagaaatagcaaaagctaaagaagaagagagagcgaaagaagcatctaaaaacaacatacagtctgctaaacgtgaattaacggtagtagcgacagcgtatactgctgatccaagtgaaaatggtacatatggtggacgcgttttaactgcgatggggcatgatttaacggcaaatccgaatatgagaattatcgcagttgacccgaaaataatcccattaggatctaaagtatgggtagaaggttatggagaagctatcgctggtgatactggaagtgcaattaaaggtaatcgtattgatgttttaatgggttcaaaaagtaaagctatgaattggggaagacaaactgttaaagtgaaaattttatagtaacaataattatccaaatagaagtcagttctctttattgaggctggcttttatttttttagtagaaggataataggatttttaaatggcttattactaaacctgtaacaaaacataaaaattaattctctgttttgatttaaaagatgggagacttgctgaacttaaaagtaatgaactaaatattttaccattcgtttcatgcttgaactgcgcgatggtgtgggaaccgcaatattttcagttaagtgatggaggtaaaacagttcaaatcatacagcagcaaaatatagaagaatggataatggaagaggaatataagttaccagtttcattaccaaaaacaacggtaaagcttataaatatgaaaaatgaagatatacctatagatgaagatagttactgggaagcttttgacttgttcggttctgaatatgtatgtagattattaggggtaccgttatatgatgatcttccaaaggatttggcgtgtccaacttgtgcgaaagagatgaaatatgttgctacaattactcaagatattgaggaacgtggacttatttcagtagttaatttccagtttggggaaatgaatatatactattatttatgtatagattgtttaattataaaaactgaaatacaaaatacataacaagcctaacatattatgttaggcttgttttttgatcgcaacatcattaagaattgcatcaaatatatctttttgcgtaaagttatctgtaaaaatagtttctctggcaaccttaatagtatcgtgcggattataccatttttgtagggaatcttcaccaaattcgtgtcgtttgtcccttttgttatgtcgtctaatagtttcctctaatgataaatcaaagtaatatgcaaatgcattttcatcaaaataacgaattaattcttttaacatctcaccatacctatgactgttcaatataccttctaaaataacaaattcacattttccttttccgtacttcgtaatttcaaatagtaaatcatgtgataaattacccattgtgtcgtgtactctaagcatatctctacgtacaatatcctgtgatactaaaagtgtcccttgtccgaaatgttcttgtagttgttttgcaatcgttgttttaccacttgcggagtttcctctaagaatgattaaagtggatgtaaatataggattagacataatgtattccccccaaacagcattaattatatagaaaattttaacaaataaagtgaggaaagtgtataatcaatatgatggatatttaaggagggggtaagatgggggatatattaaaaaatgcacaacctatatggaaacggacttggtttcgttatctaggggcattttttattgttcagttactgtttattttgtgtgaaataactgggtgggtaccaaactttaggccaggcggagagttttttaatagaatattaaattctcaatttttcactgaatggttcacactctatacaatcccgcaatttaacgtatttacagcattttttgcgattacattactaccatatgcattagtaggtgcaatgaaagatgtaacagcaagaaaaaatataaaggaataatagaggtataatatgctttttcaaaaagaaggtttattgattagatacgtaatggaagatgatgcatctatcatttctaaatggttaacggacccagaagtcctgcggtattacgaaggacgagataatccgcaatctgtagaaaaggtgcttgatcattttatacatagtccaaacagtaatgaaaaaagatgtttaatagaatttgataccattccgattggttacatacaaatgtatccagtggattcagagtggaaagcgttatatggctataaagaatcacaaaatgtatgggggatggaccaatttatcggtgaaccagcctattggggaaagggaattggaacaaaactcgttcaggcagcaattacatatattatgggtgaaatgggagcagaagcaattgcaatggatccgaaagtaaataatgaacgggcaataaagtgttatgaaaaaagtggatttaaaaaagtaaagattttaaaggaacatgagttgcatgaggggaaattagaagattgttggatgatggaatataaacaataataatggcttatacaaacaaagggggatgtgtgaaatgaaaaaagcattaatcgtaattgatgtgcaagcgggtatgtatacagctggaatgccagtacataatgggggaaagtttttacaaacactgcaagagcttattagggaatgtcgttcaaatgatattccagttatttatatccaacataacggtcctaaagaccatccgttagaaaaaggtacggatggatggcgaatccatgcggccatcgctccgcaagaaggagataatatagttgaaaagacgactccagattcattccataatacaaacttaagcgaagtgttacaagagaaaggaattgaacacgttattctttcgggaatgcaaacagagtattgtgtagatacgacaacgcgcagagcatgtagtgaaggatataaagtaacgttagtgagtgatgcacatagtacatttaatacagaagtgttacgtgctgaagatattgtgaaacatcataacgcagtattgggagcgtttgcggatgttgttgaagtaaaagacttaaaagtggctgcctctaaataagaggcagttttcattagaaaaaatagcgtcaaatattgttagtaggtcggtattttgaaataatcacttatataatttcacgtaccataatgaaaaaatacaaaaaaggagcaccacataattaaaaagggcgctcctgcattaaaacgttacttttttttatctttatccaatatattttgttcttcagcaaactctgtaccatatgcaaagcggcgattaatacgaatgttatcattgttgtgccttgtatgagagttagagaagcgatgaacgattacttcagataaagtgaagacgatggcagaaaggatactgccccatgcaatttgcatatagttgtctaataaaatattaccgaaaatccatacgcttaaatatgttaataagaaatccgacataatggcaccagtattgccaattcgatttaaaatgattttatcaacgaacatgtaggatacgattgtaacaaagagactgaatgaaataatttgaacaaacgttgcagggaaaaataaagcaagcccaatgctaaatgcgataatgcacgatataaacttgataagcactactgtgaaatcattcaaaatttacacctccgatttatacatagtttttcaataaattctggagttcatacattgtaacggatttatttacataaaactttttcatgttcggaatttagtctaaatattataaaaacaatgaaaaaatgttatagtaaaatgagagtgtatgacatttttaggtaagggggaatccaggatgtggattacttcagaagtagaaattccagatgagttaattgatcaccttgagcaaggaaagttagtattatttgttggagcgggagtttctatgaaagggaaatcaaacttaccgaattttgatgatttagttgatgaaattgcaaaaacgttatatgtcgaaaaacgtgaaataacagaaccacatgattattatcttggtaaaattgcgaaaacaaaagatgtacatcaagtcgcaagagatcttgttcatatagagaaatcaaaaccgaatccattgcattatgcaattccaaggctatttcctttagatacagatatccgcattgtaacaacaaattttgatcaacattttacaacagcaattaaagaaataaatagagatatcaatgtttattacgctccagctttaccgactgggagagcttttaaaggtcttgcttatatacatggtaatgtagaacaggagaaagaggctttaattttaacagatggtgattttggaagggcttacttaacggaagggtgggcgagaagatttttagttgatctattctcaaattacaccgttttattcattggatatagtcataatgacccagtaatgaaatatttagcaactggtttaccaccaagtacaagacgatttgcttttgtcgcacaaggagaaaatacgtaccactgggaacatttagggataagaccaattgtgtatccgaataaggtgaataatcatcaatccctcgtaaaagcagtaaaacgctgggctgaattaatgggtgataattatattacgaaaagaatgcgtattcgggatattgtaacggttcccccgtcagtagaacaggaacaattatcatacataaagcaatcgattaaaaaaattgaaacagtacgttactttgtggaatttgctcatgattatgaatgggtcgaatggttagaagcagaaggtaaattacaaaatttgtttatgcttacgctaaactataatgaagtagatgaattacttgcagaatggttagtggaacaatttctttttagtcatcagaaagaattatttcaattaatttataaaaactattctaaaatatcaccgttattatggagaacaatttgtaactacttaaacgaaacgaagagtaagatggacccgctgttgtttgcaaggtggacactccttttattagaaacagctgaaaaagatagtagctctatagaaaagatttctaagttactgcaaaaatgttcttttcctgagcataaagaaattgccttattgttactaacttttattttagacggaaaactgaagttgaaacgtgtaagaaaatgggggaatgatacgcaagaatcaatagaactcgaggaatcgagtcgcttaccagtatctacattttctcatgtggagcaaatttggaacgaaaagatgaggccatatatcgcttattatgctgttccaattatgatgattggattagaaaaattgagaatgttgtcgttaagacaaacggcactgaaaaaaagaaataaggaaaatgtagagaaagagtttcatcaaaatgatcttgcatttttaatacgaattgtaaaagagtgtctaacttatttatgcgaaaacaatgaaaaaaaagcggattattatattacagaaatgatagaagcaaatagtgtacttaaaaagcgaattgcaattgatgcgatgaataaaaatatttttgttcgtgtagatgacaaaatgaaatggttgttacatgaaggacttcttttagatttcacttataaacacgaagtttttcaacttttaaaaaggcattatgcatattgtttagaaaaaacaaaagaagaagtcactcgaactgtaataaagcatcttacagaagagagggtatttgatgcatgtctcgtattagacttattattcaagtgtgattcgaatagcccatctacggcaaatgggtatgagttaatgaagcaaaagcatcctcattttcattctgaacgatacagtgtacaaaagaaagaagatacagcagaaagcattacttgtaatgtaactgctgacggattattgcagctgaaagatgttgaaattatgaagcaagttcagcaattttcgcaagatggtgtttttgaacaacgccattttttagagatgttatcaaaagcatgtaaattaaacacagagtggagtatttcatttgcataccaattagtaggagtgcaagaaataagtaatgaagtatggtttgtttgtattagagaatggcgaaataatcgaggattgacgaatgagcaaatccaaaaaattattccgctattgcagaaatttgttagaaatactgcttttcattggttaattagtagttttctatatgaaattagtaatcgactagaagagttagaagagaatagtatacgtgttgtaaaacgatttgctttttcagtgttccctcaagttatgaagagtgatgcagactttaagcttgggaaacaagatttttataatgaatcaattcagcatccagttggaaaaatgacggctgtattattaaagttgttatcatatgatcatttatacgatcgtaatgtatatgaatatttatttttatttgaagaacaagtaagagttaattcggaacgaacaaactttatgtttgctcgtttaatagcagatattacatttctatatcatattgaaaaacaatggtgccgaaaatatttgttaccatacttagatttaaaaaaacaaaatgagattacggaatatgcatgggccggcttatgttacacgcaaataaatttacctttatttacagaaatgaagcgatttattaagtatgcgatagaacatttggaagtattacatccgcatacgagagaagctttcttgaagtggcttagctttgtatttattaaatgtgtactatattgggagcaaaaaacaaattggttatacccgttactcatactagaaaatgaagaaaataaaattaagtttatgcagtttttatgctattacgtcaaaacattaagtgtaaaagaacaacaaaagttttggacagcttggctcagtgtatttttgcgagaacgaccaaaaatgggtgagataactgcgagagaatatgtgatgcttttacgtattattttatacatggatgaaatattagaaaaaggattatgtattatgtctcgtgcattttcaagtgtacaaggtaaatgtacaggtgaggaaatgaagcggttattgattgaaatgcttcataaaaaagaaagtatgaaagcgcataaagaaatgtttgcaaatgtgttttttattttactacaaacatgtcacgaagccgttttatttgaaaaagaaatcatacaaataaaagaattattagttcagtatgaagtagaggaatatgttttacatttactagaaaatgaaataattcgcataggaattgtaatgggtgatttacaaaaagaattatagaacgaaagtggaatttaaaaaaatatataaaaagttgttgacagtgttttgaaaagcgttctataatacgaatcatacttattcaatttcaaaaacatttgaataaacaaagtgcaatgaagagatcacagtagtggttagtcttactgtaacagagagctggtggttggtgtgaaccagtacagggataatcatgaattacagtcttggagcatctttttcgtaataaagatagtttgtctttatgaggaaaaagcggtcaattgatcgttaacagtgaagagaggtagacggaaagttagtctacaactagggtggtaccgcgataaatatcgtccctactgatttattcagtagggactttttgtattttagtggttcaacttgaaaattaaatagtcatgcattgaaaggaaaagcagtagttgttgtttccctgtaacagagagctggtggttggtgcaaaccagtacataaacaagagcgaattacagtcctggagcatctttttcgtagtaaagatagtattgtctttatgaagggaaagacggtcagatgatcgttaacaatgaagagaggtagacgaaagaagtctacaactagggtggtaccgcgataaatatcgtccctactgattgaatcagtagggcttttttgtacaaaaaagtgggtttttaactagtagttcatgtctttgtacgaattattagtttaaaataagaagaggtatcgattccactataaatttgtataattagtcagttcagaaaatagagaattttttattctcttactatacttttaaaacattagaggaggatttccaaatggcaaatcatgaattagatcaattacgtaaacaggtagatgaaattaacttacaactattacaccttttaaacaaacgtggtgaaattgttcaaaaaattggagagcaaaagcaagtacaaggcacgaaacgctttgatccagtacgtgagcgtgaagtacttgatatgattgcagagcataacgaaggaccattcgaaacatcaacagttcaacatattttcaaaacgattttcaaagcaagcttagagttacaagaagatgataaccgtaaagcgttactagtatcacgtaaaaagaaacaagaaaatacaattgttgatgtaaaaggtgaattgattggaaacggaacacaaacgttcatcatgggaccttgtgcagtagaaagtttagaacaagttcgtcaagtagggcaagcgatgaaagaccaaggcttaaaattaatgcgcggtggtgcattcaaaccgagaacttctccatatgatttccaaggtttaggagtagaaggacttcaaattttacgtcaagtagcagacgagtttgacttagcaattattagtgaaattttaaatccgaacgatgttgaaatggcattagactacgttgatgtaattcaagttggcgcacgtaacatgcaaaacttcgatttattacgagctgtaggtaaagttaacacaccagtattattaaaacgtggattagcagcaacaattgatgagttcattaacgcagcggaatacatcattgcgcaaggtaacgatcaaattattctttgtgagcgcggtatccgcacatacgaaagagcaacacgtaacacattagacatttctgcagtaccaattttaaagaaagaaacacatttaccagttatcgttgatgtaacacattcaactggacgcagagatttattattaccaacagcgaaagcggcacttgcaattggcgcagatgcagtaatggctgaagttcatccagatccagcagttgcattatcagattctgcacaacaaatggacattccagaattccatagattcatggatgagttaaaaggtttcaaaaataaattatcttaattccatatcatatatgcattgaagaggaaacagtagtgcttatctcactgttaaagagagctgatggtcggtgtgaatcagtacaaaggtaagcatgaattacagccttggagcatctttcccgacaacttttggagggtaagacggtcgaacgatcgttaaagaagaagagaggtagacgaaagaagtctacaactagggtggtaccgcgataaacatcgtccctactgagcgctcagtagggacttttttgtacaaaaaaatagtaaaggggcaagagaaatgagatacattacagctggagaatcacatggaccgcagttaacagttattttagaaggtgtaccagcaggtttgacacttacggcggaacatattaataaagaattattaagaagacaaaaaggtcatggacgcggaagacgtatgcaaattgaaacagatacagttgaaattgtaagtggtgttcgtcacgggatgacacttggatcaccgattacgttaattgtaaaaaatgatgatttcaaacattggacgaaagtaatgggtgcagagccaatttcggaaaaagaaagtaaagacatgaaacgtacaattacaaaaccacgtcccggacatgcagatttaaatggagcaattaaatatggtcatcgtgatataagaaacgtattagagcggtcatctgcaagagaaacgacagttcgtgtagctgctggtgcagttgcaaaacaaattttaagcgaattaggcgtgggaattgcaggacatgttcttgaaattggtggagtaaaagcaaaacatatttcaaacttatcaattgaagaaattcaaacaattactgaaaactcaccagttcgatgtttagataaagaagtagagcaagaaatgatgaatgcgattgacaacgcaaaaagtagtggagattcaatcggtggtattgtggaagtcattgcagaaggtatgccgattggcgttggtagttacgttcattacgatcgtaaattagatgcaaaacttgctggtgcaattatgagtataaatgcatttaaaggtgctgaaatcggcgtaggttttgaagcggcacgacaaccaggaagcaaagtgcatgatgaaattctgtgggatgaaaaaaaaggatacacgagaaaaacgaataatgccggcggtttagaaggcggtatgacaacaggtatgccaattatcgtaagaggcgtgatgaagccaattcctactttatacaaaccgttagcaagcgttgatattgatacgaaagaagcattccaagcgagtattgaaagatctgatagttgcgcagtaccagcagcgggtgtagtagctgaatctgttgtggcatgggaacttgcagatgcactagtcgaacaattcggaaaagatcgtatggaattattaaaacaaaacattatgcaacacaataactacgcaaaagaattttaataaaaaggtgggtttaacgtgcaagtaaaagatcaactatcatcattacaaccatataaaccaggtaaatcaccagaacaaatgaaagaagtgtacggagatcattcgtttgtgaaattagcatcgaatgaaaatccatttggttgttcaccgagagttttagaagagttgcaaaactcttggttggaacatgctttatatcctgacggaggtgctacaacgctccgtcaaacaatcgcagataagttgcatgtgcaaatggaacaagtactttgtggtagtggtttagatgaaatcattcaaataataagccgcgccgtattacgagcgggagataacattgtaacagcaggtgcaacattcccgcagtaccgccatcatgcgattattgaagggtgtgaagtgaaagaaattcctttaaataaaggtgtatacgatttagacgaaatttcgtcagcggtaaataataatacgaaaatcgtatggatttgtaatccaaacaacccgacgggcacatatgtgaatgagcaaaaattaactcgatttattgaaggcattagtgaaaatacgttaattgtcattgatgaagcgtactatgaatacgtaacagcaaaagatttccctgagacattaccgcttttagaaaaacataaaaacattcttgtacttagaacgttttctaaagcatacggattagcttctttccgcgttggatatgcgatcggacaggaagagctaattgagaaattaaatgtcgtacgtttaccatttaacgtatcttcattagcgcaaaaagcagcgacgattgcttttggtgatgacgagtttattaaagaaatagttcacatgaatacagaaggattacagcaatacgagagtttctgtaaggaaaacggtataccattttattcgtcacaaactaatttcatcttcttaccggtagataatgctggagagatttatgaagcttgtgcacatgcaggatttattattcgtccgttcccgaatggtgtccgtattacagttggaacaagggagcaaaatgaaggggtgatttcagtgttaaaacaacactttgaaaataaaaaaaataagtctcgagatgaggcaaatgcgtaaaaaggtagtattaattggaacaggtttaataggaggctctctcgcattagcaattaagaaagagcacgatgtaacgataacagggtacgatatatttaaagagcaagtagagcgtgcaaaagaattacacgtagtagatgaaataggagttgatttacagcgtgcatgtgaagaggcacatttaattgtttttgcttctccagttgaagaaacgaagaagctattacacaaacttgcgtcattccgtttacgagaagatgttatagtgactgatgttggtagtacaaaagggtctattatgaacgaagcggaagctttattttcaaaggatgtttctttcattggtggacatccgatggcgggttctcataaaacgggagttgaaagtgcaaaggcacatttatttgaaaatgcattttacattttaacaccgatgaatcacgtgccaaataaacaagtggaagaccttaaagtatggttaaaaggaacagggtcacattttcttgttttaaatacggaagaacatgattatgtaacagggatcgttagtcattttccgcaccttatcgcagcaggtttagtaaagcaagttgagaaacatgcaggagataatccgctcattcatcaactagctgctggaggtttcaaagacattacacgtatcgcatctagtagtccaaaaatgtggagtgatattgtaaagcaaaatcgagagcatttaatggtattattaaaagagtggatctctgaaatggaagatttatataaaacagtttctaccggagatgcaggcgagattcaaaactattttgcagatgcgaaagaataccgtgattctttaccagtaagaaagagaggggcaattcctgcctatcacgacttatacgtcgatgtattagataaggtgggggcattggctcatattacgagtattttagcgcgcgaggaaattagtattacgaacttgcaaatattagaagcgcgtgaaggactgcttggggtattacgtattagcttccaaagggaagaagatcgtatgaaagcaaagctagcgcttggagaagaagaataccaaacttatgaaacaatttaaatgagaaggtgaaaaacgtgaaagaaagaacaatacaacctgttaataacggattgaatggcaatattacaatcccaggtgataaatccatttcacaccgtgctgttatgttcggttctattgcagaagggaaaacaataattagaggtttcttgcccggtgcagactgtttaagtacgatttcatgttttaaagaaatgggagtagaaattacgcaaaacggtgatgaggttactgtagttggtaaaggattagaaggtttacaagaaccgaaagctgtattagatgttggtaattctggtacaacaatccgattaatgtcaggtatattagctaacacaccatttttctcttgcgtacaaggtgatgaatctatcgcaaaaagaccgatgaagcgtgtaacaaacccattaaaacaaatgggcgcaaacatagacggccgagaagaaggaacatttacaccgttaacaatacgtggcggcgatttaaaagcaattgaatatatttctcctgttgcaagtgcacaagtaaagtcggctattttacttgcaggtcttcgtgcagaaggtgtaacagctgttacagaaccacatatttcacgcgaccatacggaaagaatgctcgaagcatttggtgttaaagtaactcgcgaagggaaaacagtgaagctgtcaggtggacaaaaattaacagcaacagacattcaagtgccaggtgacgtatcatcagcagcgtttttcttagtagcaggtgcaatcatcccaaatagtaaactagtattacaaaatgtaggaatgaatccaacccgtacaggtattattgatgttttagaaaaaatgggtgctacgttcactgtagatctaattaacgaagaggcatcagaaccagctgcaaatattacaatcgaaacatcttcattaaaaggaattgaaattggcggagatattatccctagattaatcgatgagattcctgtaatcgcattagcggcaacgcaagcagaaggaattacagtaattaaagatgcacacgaattaaaagtaaaagaaacaaaccgtattgatacagtcgttgctgagttaacgaaactaggagctcgcatagaagcaactgatgacggtatgatcatttacggaaaatcagctctaaaaggcaatacagtaaatagttatggtgatcaccgtatcggaatgatgcttgcaattgctggctgtttggcagaaggaaaaacaattattgaagatgcagaagcagtaggtgtatcatatcctacattctttgacgaacttcaaaagttagctaaataaaaagggtggaaagcagatacgtgatgtatctgctttttttgttaaaacgtccttgtaatttcacttatcgaactataatagtaagaattatgatacaattcaaacagagaatggaggagaattatatgaatgtcatacaattaaaagaagataagtttagagaagcattacgtttatcagaatacgcttttcaatataaagtagatgaggaacgattacagcagcaacttacaaaaatgaaggaaagtcatgaaatatacggcattatggaaggggaagacttagctgcaaaactacacctcatcccgtttcatatttacataggtaaagaaaaatttaaaatgggtggcgttgcaggagtagcgacgtatccagagtacagaagaagtgggtatgtaaaagagctacttcaacattcacttcaaacaatgaaaaaagatggctttacagtctctatgttacatccatttgctgtttcgttttaccgtaaatacggctgggaactttgtgcgaatctactcaaatgtcatataagtaagagcgatttagtgatgaaaaaacaagtaaatggtactgtgaaacgttttaataaagaaaatcatccagaagaagtcgagaagctctatgaagcatttgcagaacgtttttcatgtatgttagttcgagagaagaactggtggttacaagcggtttatgatgatttaacattagcgatttactatgatgaaaataaaaaagcagcaggttacatgttatacaaaatagaaaactataaaatgacagtagaagaatttgtaccactgcataatgaagcacgaaatggtctgtggaactttatttgtcagcatgattctatgattaaagaaattgaaatgacagtaagtgaaagcgaaccgttattatattcattgcaagagccacgcgtgaagacagaaataaaaccatattttatgggaagaattgtagatgtagagcagttcttaaaacaatatgagttgaattggaacaatgtagagcaagaagtgatcctaaacattacagacgcatttgctccgtggaataacataacagtgagacttgcaaatcatgaaataacaataataaaagaaaaaacaatagataaaggcatcaaactggatataaacgagttatctacaataatgttcggctataaacgtccgttacaactgaatgaattagaattaattagcggaagtgaagaggaaatacaagcgtttgagaaaatagttccggtacgagaagcatttatttatgatttcttttaagttttcaatagaaaattgggctgcccaaaaacaatttttgggacagctttctctttggttgtcggtaagtcgatatatcctgaaaatcgctgatataattggagatgcgccgatatattctgaaaatcgctgatataattagacttgcgctgatatattctaataatcgttgatataattttttcactaaaacgtaactatactttgtcacgcacttgacttttaatccatgtaatttataattaaaaacggaatgaattttcattcctggaaatagaggtggaaaaaatggctaaaaacaaacaagaggatatttttgatgctgcgatgcaactttttgcagagcgtggttacgatggtacgacaattccaatgatcgctgaaaaggcaaaagtcggtgcgggtactatttatcgctattttgaaaataaagaggcacttgttaactcattattttcaaaaagtatgttacagctttctgaaataataaaaacggattttcctgttgaagcaaatattcgtgaacagtttagtcatacgtacaaccgtttatttgaatttgcgagaaacaatgtagatgcttttttatttacaaattctcactgtgatagttattttcttgatgaacagagtaagaaaatatttgatgattttataggcttctttatgaatattattgaagatggaatcgcaaaaggttttcttcgtccattgcctccagttgctttaattattattgtatatcaaccgctagaaaaattaacgaaagtaattgcaacagggcaattagaatactcgaaagagttagtaaaagaattagaagaaagctcttggaacgctattagaatcatttgattctatagctttataaggaaaggaatgaatattcattcctaaatagatttaaaaaatgagagtaggaaaggatgtttgtgtaactaagggaatgaacattcattccggaaagactagtttaatagaatttacaaaataatgtaatagaacaataggaatgaacgttcattccgttactaacgtgaaactttcaaaacgggagatgattcaaatgagcaagttaaaaagttggagaagtttatcttttctattatggatagttattactattacaatggtcgtaacgatgcctaatatggatcaattagtgaaagaaaaagggaaaattacaatccctaatacaaagcaaagcagtattgctgacaagatgatgaaagagatggataaagaaggggttgaaaagtatgaaattatagccgtttttaatagtggcaataaggcagctttaacagatgaacaaaaaaaggaaataacaaaaacaatcaacgccctgcaaactgaaaaagagcaattaggaattaaggaagttgtttcacatttagacaataaagacttggagaaacaattagtttctaaagataatacgactattttaacgcaaatatcgatagataaaaaacatggtgaaatatcaaaagtttcaaataatcttcatgaaaaagtgcaaacgaaaggggtaaaaacgtatttaacaggaagtgacttaatagcgggtgattttcttaaatcctctcaagagggagtgaaaaagacagaagttatttcaatcattttcattcttgtagtattaatcctcgtattccgttcaccagttgttccaattgtttctcttcttacagttggtatatcgtatttagtttcaatggggattattgcccagcttgtagatcaatttaattttccattctcaaactttacacaagtgttcgtagtcgtcgtcctgtttggggtaggaacacatgcccatcaacttaaggatagaaactctacggttttccattaattgaaatgaaaaaacaccccctatttatataaaaaactccccttgacttctcatagttggtctttccttacgatttagttaaaacatatgaacaaacttttcataaatagatgtaaaactgaagcctatcacaaatacaataatgcacaaatatgtagaaataaggtatttgaagaccatacctggccgcgatgcaactaatgtttcataggattctgcccgtagtcttctcattaacttaatttgattattaattatttctctacttcgactttcgtccataaccattgcttgttgcaaggaaaccataaattgatacgcttctggtatatctaattgacgcgcaaattccagatatggttcaaaatcccccggatcaagttcaatttgtgcaattagatttttaactagtggtcttaaattatctgaagcatattctattgatctcttagtagcttcatatgctgtgtattttccaatcatataagctaaagaaatcatatactctggtaattcaagctctagtcttaattttttcgccttaacatcactatttaatttagattccttcacataaaatcccataacagcaaataccaaagctaaagggaaaattactatttttaaatccggaacataaaatattaaactagctataactaaaaaatttataattgagaaggtaagtttactaataataaactccattggtgtaagactcgaattaactttttttagctttttctctaattctttttcacgttcttgtgatatccaattcttctttaattttaaaattgggtacagcattgtatacaaaataggttgtcttttatttgccaccttacttttttttacaatgctataaatttgaaaccttttacttttttgtctttccagtaccaggttgtaaaccactaatacaaagagtaagactaagataaatagtaaaattaaaggatatagattcactctatcaccttcttattattttatttttgtaatatcttctgtaggatcgtagaaagaatgtttctctatcttaaatgcactaaatatgcatactacaattattgctaaaagaatgaaccttccttgtaacgtccttgcaaatacaacgtaatcatcggcattgatcgccaaggctgcaaccggtaatgaagcaagcatgatagccgtttgcttgaatgttttcctttgcggttgcatacctgattttaattttgcacggtatatttttttatcttgaaattcatgtgcaatatttaaaagtatgtcatccgtatctttacctgtttttgaaataaggtctaacatatcatgaaagagcttaatatctttataattatatttctgtacgaatgaatgaaaggcatctctaatactctttccatcttccgtgtataagattaagcatctttctacatcatcttttataggagattgtagtaacggcaaaacactcttaaaagctagtgtcatactttcatgtgtagaaactgcatttgctacagcttctaaataaaccatcaactgattttccacatattcttcgtatttcttacgcttataaaagccaatgattggcggaagagatactcctaataataccccgaatattgttgtacttaatgacataaaaaaaccatacaatgcaacagctccaactagagtccctataattagtatgatttgataatccctgaaggataaattccaattaaaatctttactttccctcagaatatagttaggactgatccatttatacaatccttttccctttaaaaatttcactatcttactatcatctttttcattcgtaacaattaacttgcctttttttcttctttgaattaaattgattcccaaattaactacaaagaatatagcaactaccatcaaaaaatatggaagataattaagaaatcccaattaatttctccccctctttcactacaggaagttcttttgtaacctcaagttcagacgttttaatccctttaaatttcagctctttaatcatacgaccactcaatttccctaccctttcatgggaaccattgattataaatttcgtttgatcatgttcatcctggaattctttaatttctttaacattaaataaatatagaggtgtataaattagttttccattttcatagccgatatactccacaatttcggttagtcttcgttttccgtctaacattaattcaaagtgcataccgtaatcaaaattcaaagcaatactttgctgtaaatattccttggatatattcacagcttctaaacacatactagaatagcgttcaacactatcagctgcgcttggagagtgtaaacttgtaagaatcccatgacctgtttctgctattttctttgccccccaagcttctctccctcttaactcgttaatacatataatttttatagtttgtctgactacaccagataataaatcttcataagtaacggaggtagaagaatcttctctttccctggttaaccaagtacttaaattccattcctttgaataaatttgtttcaaattcatttcatcaacgtcttgtaataccaatgttttatcggtttttacttttttacccaagagatatttcataaattccgtttttccagtacctgtttctccagatataaggattcttgaacgcgatctcatcatcgctgtaaagagtggaagcatctctttacttgcaagaccttcttcaactatgatttcatcattgattcttaaagtcttaccaaatattcgaatcgctaacgaaacaccatatttcgaaatatcaaagcccactaagttaattctcatatttggaaaataggcatcacatttcggcttactatgtgtccaagtttgaccagatgcgtttacaaatttattacataacgctagatacgcttctttacttttaaaggttacatttgaaagataatcccctttctctaaatcctttatccaaatctcgtcccagttattgcaaataatatctgtaacagtgtcttgttcagcaaaagcttctaacacatcaagacccgctacggcgtctacaattcctttagcaagttgttctaatgtaaatccttctatattaggctgtgatgtaatgaactgtgaaacaacaccccatagtgctttctttttgacttcatcaccaaaggattcttgaattaattctttatgttcatctaataaatatttctttacagtatcaattaaatcttgaggtatctctttattagtagttgtagatgtgtgtcctccagatttgatgatataaataaacgtttctatattaatcctttctggcattaaaggtatgtaacctaaatcttctaaagaaatcacattttccataaatttcaccacccctagatcattcaattctatttacttttgaaaagtcggaatccattttgttcatttctgataaagcaccctaatttcctagcaatatttttcatatattcatctattgtttctgatcccaactgtagtgaaaactctatttccgctctttctggatcataaggaatacaagctgttacctcaaaatcaactaacattttgtagtcctcttcatcaattttattgctacatagattaaatacatgtacccactctttgtgttgcaagtttgccttttcaaaaacatttgttatgttcttgtatcttgataaaacaattggatttcctgttaaaatactgactacactatcacatttacttaacataggtaatccaaaaacattttctatttgattaggcaactgaagtattacataatcataatctagtgcctttaatttactaataaaatcattactgaacttctctactaaagtttctacatttgttttgaaacgaggaaagctctcttccgcaaaatcattgctgaaagtcaataattccatattactcggaaaccaggaaaatctctttccctctctaacctcattttttttcaagatatacttttgaatatcaaatcttccttctagaatggccttttccataaacaattccatatttctttctggattagatattgatgttttatgtgcaaatgtagcatttaaataatctaattctaaatacagtacctttgaattagattcacctataacttttgctaatgattgaccgattgttgttgtgcctaatcccctttgcacaccatatatacctataatttttcccattatacaaactcctttcttactttaatttatatgactgatcctgaatccactttgtaatcaaatcgtcattcgttctttcaacattggcattataagattcaccagaagcaacaggaataatttcaccaattaaggctcccttatttaacaattgattttcttcatctgaaactgcgaaagtataaattttagctaacggacgattcttcgcctcattatttaaattgtctttgtatgacccatcaacttctacacttttgggatcaaatacatttgtagcattactatcttttactgaagttaccctaacatgttttgcaacacgcccaaatataggcttttcagtatggtccgactcattcttcaccttacctttaaaatacaggtctacataagaatccgggataatactattaccagatgacgtttcaatatctaccaacaacggaaaagctacttcacttttcttcaaatttagtatggctgcatccggcaattcatcctttggaactactttgtccttgtacaataaagagttctttgaaactccaaatccgttcactgtatacttaccttctaaatcttttacatttgtaatagcattaggggcaattgcatcaccaggaatgaccctctcttgtaacatatcctttgtaatttttgttcttggtggaatatcaactttactgtaataaaccttagtaggatttatcgcactattaattttgtaattttcatatcctgcaattgtcgctactaagcctacagcaattaatacactcacggtttttttcggaagctttttcaccaatttcttcaactcctatttcgttactttcttcgcttcaaaaatcatattttcgaactgtctaactgtcgtttgatcatccggttcttttaaatatttcttaataggtatagcaaaagtgttgtatgattcgactccaatcattgctggttgagagttaatggcataaatatttaatcgtttttcaccatcatggaaatttgactgattaacatattctctaatcagggtttctttaacgactttctcattaatggttatttcttcatcaactcttaattgccccatattaattccttttgacatggctgtagctgttgcttgatgtaagctattatcttcatttgtatccgctgcaaacataaaaccggtacttgctgtaaacaacataatcccgatcaacaccagcattattacaacaaattttggtggttgcattgatttgtacacctcaccaacatattttttcgtatacaaaaaacctgttctaaaagctaattgcactttcaaaacaggctttcttattatttaaaattaaatctcgttaggaaatcactattcagattgacgtctgaaccatgcgtcttgttatattctttaatttgcttatacatttctggagtaattttataactctccatatgataccctgttggtatatcttttggatttggatattcccatgtattccaccagtccgataaactagttaacataggttctttatttttccagttccatcctacttgccctgggaatggattctgtggatttacagagcgtttaataaaatcatcatttccttttttatcaccaatccctgaaccttccacttcaatttttcccgtaagacaaagatttaacttattaacacccgcaccataagccattgctttaaatgaatacgttccatctgcttgtgtaaattcggtataccactttctcccgccatctaaaatagtttcattaggattgtatttaggatgctttttatagttatcattaaatacatttcctgaaaatttttcaacgtaagtatgaggtaatgaccaaacttgattatatcctcctagtgtttcatccattggtactttgtatccatcctcagtttttgaatactgttgatgttgaaccattgtaggaaggaaagatgttgtactcttcacacccgtagcatgacttgatgaatcttcatttgtgtaggttgttttcacttcataactaaatccatatcctgcccttattttaggctttgatatattcacaatactacctgttaagcgttcatataatgtgtccctatctcctgcgttattaattgtacgcacaacagctgttactgtagctgtagaattaggctgtgaacaagtagaggtttcatgtgaagcaacattaattggggtatccaatttattattattaaagtttgtttttaatacatctttactattatcatattttcgcggcttaggattgatctcagcctcaatttgtcccgaacttggtactttccaatcataatataaaactttagattgtccttcggataagttgaccttctgttgtcctactatattatcttggaacctgagaacaacatttggagtggtgtttttatattcactctccaatttatctaatctatcccttttattcttctctttatttaatttttttgtttctgtactaatcatcgttaatattctatcaagattatattcatacgatgaacaatcacggggaacacaatgttgatttccttcttcatctattgtacaaattctatcatatcgacaaaaattcaattcttccctcgcgtcttgttttctgtcctctaatttagaaagttctcgctcttgatcctggatttttcgatctaattcttctcggtatttttttcgctcttctgaaaaatcagctcttgaaaccttaaccggtgtttttacattatcaccagattcaacagtttcaccctcaatacgatctactgaaaaatccattttgtacttaaatgtatcttcatcaccttcaccacctggagttggtggtttctctttgtcacaaccatttcccgaaatagtaaaggaagttttcttttcctttgctggtctttgtacagcgtcatagacttgtaatttcgcttcaaacttcccacaagtcgttggctgccatcgtatagggctacttgatcctttccctccaaaatatccagcatcgccctcttccggcttctctgaatctttcttaggattagaacgaatatatccttctttagtatcaatttcagaaccatctttatatattttcagaacccattttactctatttcgctccccagccatttccgcataaggatttatagtttctgaccccatattattatctgtatatcctttatttttggttacatattcaaaaccttcaacatgaaaatctactgtattacttttaggaccgtcagatgcttggaatttttttatatccggaaaactagtacgtacaataaagatattaaatttgttaatatccttttgtagccctgcacctgccataccacctgaaagataagccatatccctaatccaatagaatttaccatacgactttggaaacgcaacacttgtcacttcataaggtaatatatactttaaaacaaaatctggattcccccgatacttttgtgaaatcacttgggagtttaccctttctacttctgtaatcattctattacctagtgggataccacttcctatatatccatcgttcgctacattaacaaaaggttcactataatcaacgctctgtaccaagttcgctctttggtttccccaatcaaagctaccgttgtaaagagctgggtaatgaaggtcagctgtataataaatatcaggtggtgcattaggtggtaaaaattttcctggtcttaaataattaccaggcatttgcaaacccttgctccgtatcaaggtttcattctttccatcataaaaaggaatatcactattccttgcatatgcacaattaggaatacataacaaaataacgaaaataaatactaataattttgatttcattatcttcctcctattatatttcgaaggatattttaatttctaacaaaaaatccgttttagtaaaatactaaaacggattttctctttatttcttttcaattataattgtaatcatttggtctgccattgctggactgatacgaattttgtaatcccctttttcaacattcttaatcttcattggtgctgaaggaatttcttgaatttcttgatccaaattcaaatctgaatttacaagtgtaactaattctttcgtaagctctatcattgcattatttgataccctgaaagtaactctaaaatcatttacattcataccagctaaccaaagttgttctcttgcaccatccactaattgtacaattgcccctacttcactatacttcaagtttgttccatacttgctatttatatttttaacaatttgttgagcgttagtagatgctgctttattaatagcttctgatccatcataccaagcttgtgtaaatgtaaaatcattcgttgctaaacttgtttctaaccattctggaatgttaactggtttcgtttcttctccagtgtttggtttttcttctggcttaacttctccgccagtattcggtttttcttctggcttaacttctccgccagtgtttggtttttcttctggcttagtctctttctctattacattaatagaattaaataaaaactgactatattgttctcgtgttacaactgatgttggtgaatacatattgccacctgtaccaattgttacgcccttctcttctaaagcaccaattgccttgtacgaccaagagtttttatcaacatctacaaatgatgtttttttagttccctcaaatttgaaagcatttgtaagtacttgcgccatttgctcgcgagttaagatgtcatccggtccaaatttaccttctccataccccttaataataccaactttagcaagtgctagaatctctttttcaaacatatgccctttaatatcgctaaatgggtttttgaaattacctgcatctgctggctttaagtagttatagatcatgcgagcaacttgcccacgggtaacattatcgccaaaaccaaactgtccattcccgtaaccaacaacaatatttctattcgctaagtttgtgatcgctttagtcgcccagtggttatttggtacatcatagaatgatatagtatcagctttaacttcagctggcttgatatggtcaacattgattcccatacccgttcccatcattgttaatgctgccgttgtagttagaattgtttttttcatgattaatcctccagtttaatacttcatcttaatatacctataatacaaaatatattaccactgtaacaatactagcgacataaaaccagcaattatagaaattgctgccggaaaacggtaactcatactgattattttcaaaccttctgttgttagttcaatgctaatcttcagaaatttaaaggaatggtagccgcttattgttctggtaaatatatatttttttacaaacaataaaatcacaattaacccatatattactgctgataaaatgaatactgttacatgtaataaaatcggtatcaatagccaatgtatcttcaaagaccctaagatatataaatacatagatgaaatcactatcatttttgtatctccaggcgaaaacttagccaatggcattttttctctaattaacacaccaattattaatgcaacaattgcgattacgagtagagctaacacattcttattctgaattacacaaagaactattgaaagactaaaaaatattaagtgccaatagtttttagtaatcagatactttaaatccataaaaacatttaaactcatgtaaactgtatataatatcaaggtgttcacgaatttttaacatcaccacctataaaatctaatttcttataattagcgattttgaagtctacttgagaataatcaatttgtataaagtaaaagaataaaattttgtcaattatggctagattgacgacctcgtatgaggctgttataagttattcccagtctaacttataacagcctcacacagcacaacgttttcggcatgtacgaagaacctcgtatatctaccttttgatattgatcgcttcatcgaaacgtctacttgggatatttctcacgattatatcaatcagatcatcgatacactgttaaattacggccacagatgagttttaagttccactcaccaaactctactcgtcgacctaaccctctagtgaccatatcaagggcggcacgcaatattcatttatcaaaggatcaatttgtgctgtttacaaaattccaagtggaatccccaccaaaagatatttcattcaaacggaatcttaaaatactctcacagcacacttcaaaatcgctaaacttcaacttactctgcaatctttttgggttttcttatcactacaagctcatcttctggatttttccttttagcaataaggttattatttttatccactactgatcgtaccttataatacacttgggctatttttacgatttcccctgttttattttcgatagcgacagcacctcttaactgatatgttttcccatcaaaagtttttacagagtgagctttacaagatacatcataaaatgtaagcctactttctttttccataaactcccccctttgaaggtattttctatcaataaaagaaaaataataataaaataatatttttttatcttatcactgcttataaacccgtcttatcatttacaatagacaagggtatacataatgataaaaagtaaatgtttgaaagcgattagttaatgaggttatttatcctcaagtttggcatgatacaaactagattcgaacagtctttcaaggggttcttttaaatatgtacttattgtcctagctctttttgcattaacaccacttctgcctgtttcaatgctataaagagtattttctggaatattagtacctaatgaaagttctcttacagttaggtccttttcttccctaacttttcgcaaaactgtcgatttagttttatttgacaaagccaaatactcacctccctgtctatattctatttgattatcaatcaaacgtcaactgtttgatgacgtttttttactcctacagaataaagaaggttaggtgacatctactaatcgcaataacatacgaaaggttgattggattggaagataacatttttggtagaaatttaaggaatttaaggaatttacaggggttaagcttaaacgcattaggtaaagaacttggcgtaacaggaagcgcaatatcaagttgggaacttggtaataaagaaccaaattttgatatgctaaaaaaagtatccggttttttccaagttagcaccgattatatgttaaactaccaagtttttgacgatgaagcacaaagaaaagaagtagtttctcaattagctaatgaaatctacgaaaggtacaaaaatatcccagatagcaaaaagcctatggttaagcaagaattaatcaaatatgtgaattacttaaatttcacagcacaagctgacgttgaagaattaaaaccagataatgaaaaataagtgggtagggtatctgttacaggatactctactctttattttcaatttttcgaagtacatctagaatcttataaaaaaattccactggattttcttgattatttagtacatcttcaaataaatctttttccatttgttgttcaatgaactgttgatcaatttctttatattgcatatgcataaatctccctccactgaatattacatttaatcagattacggaattcatttaaattcgacatagaaattttggtgacattaaacacaaaatacgataaataaaaatataacggttgaacgatattatttgtacaattgaatttcgttcaaccgtcatacaaatagctattctttcataagctcttcggtctttatcccaagagcttcagctatttttttgatattttgataagtagggtattttctttccccactttcaatttgagaaattgtcggttgtggaacaccggatttttttgctaaatctaattgagtccatcctttctgcaaccttgcttctcttatcatagtcatcatatatacagccccttaatattcgatatcgaataattaaattactgtatatatgatacgagcctaaaataaattcgggaagggttaaaaaaataccccttcccgaaatgttatttaaatgttaaaatataatatttttacgatttttaaactatcactttttaattttactattaatcattttaaattgtttttttatagtttccactgatttaaacaacatatcagcgatttgattcttatttaaccctttttcttttaacttgtatacctccctctccgaaggtgttaaaacactaattctcctttctgtcttcaaagcatttacaagtgtaaaagaaacatccgaatgaatacttaccttaccttgatatgcatctcgaattgtacctggaatgtctctatatgaggttttagtcacataatttatagcgccattatcgaatgcttccaaaatgatttcttgttcttcccaagaagtcaacatgataatatttttaaaacctctatcattccaatgatttgcaacctctaatccatttaaattttcattatcacttgaatcagataatgttaaatccagtagtatcacatctatattttcgatatttattgaaaaagcctcttcttttgtcgtagctttttcaataactgttaaatcattttccttctctatatactcacacaaacacttcatccatactggatcatcttcaacaacggccaatctaattatagtcatcccttacaatctcccatctatattaaattgttcattaatgtcaagaactctcctggctggaagtgacaaagtaaatgtagtcccttgattaactttactcttaatagaaatgtcgccaccatgcttctgcattacattataggagtatgtcagacctaatccatagttccctttcgtgcctttggtactaaagaaaggatttagtacctgatctagtttatcttttggaatccctttcccactatcagtaatatctatatatactttccgtctagttttataaagcttaactaacaatctcccgtcattactcattgcctctaaagcgttcttaatgatatttaataaggtttcttgtatatgtataggatcaccctgcacttttacatctacttcatactgtttaataacctggacatttgaatttaaatacggttgaagcaaagctaatgtagattcaatattatctgataaccaaaagtgtgattcctttaaattcataacgtctaatttactttgaatacgcgcggaaagttctaaaacatgttgagtagaattaagtgctaactctatactctcattagctttttcagttaaattatgttctttcaactgactgactaaaaagtcgatttttgctatttcatttttaatcgtatgatttaacaaagctgttccagatgcaacagccttcatagtagtatctctgtgctgcctttcgaaacgaattttaacatctaaaaaaccgtattttataataagatacccaaatataacaaactgaacggcaataaccaatggattataaaaccatacatcttttatacctaaagcttccaaaatgatatttgtaaccaaggcaaaagtatttactggaaggataactatacatgtaaatattttgtttttctttatagctggtctagtctccctaaaagtagaattaatcattaatatatttgttcccataacataaggaactgtccaataagccaaaatgacataatgagttttaaactcaggatatatttgatcaatactatacatatagaagactggaattaaaaataatatatttcttattattcttttaaggtgtgaattagtcctaaatactccagaaaatacaactccaaacatccaaatagcatatggcgttaaataatgcccccatgatgttgcgattgcatctatccataaaattaattccggacgatctggccctattccgagcataaccccaagaccgccaaacccaccaaacaaggcaattgcgctcgcccaccgtgtttcttcatttttaggattagttagaaataatatggctgccatcatccacagtaaaaataccagcactatcatatatacaccctaacattattcgctttcgaatattcgttttcgaataaattctatggtatccaatacaatttgttttcttttaagtacaattccagcatgaccacagttataaagataacgcgtgggtttattccatgcttcccaaagataacttgtatcctccatatgaacgtattggtcatactttgctgaaatcaatagaatattcttttgattcattattggagtagcttgacttggttcagtaattttccaactctccacgagttcctcatatgtaacaccgtgaacagacaaatccttcttaatatatttccctggatttgtgttccaaattgaatatgaaagacgatttgcataaaaaacagaggttaacacatcaatttctggttcaaccaatgctgttaaattagtaataaatccacccaagctcacacctattaatattacaggaccttttttattctccttgatccaatgaatcaatcctcttagatcaacaaccgcttgttgcgttgatttcacagtacgttgtatgtccgcacttaccatatactcaccactaaataatgattcttccggttctctagcgaaatgataaggtagagtaaaataatataaattccaatctaaatctatcattttttcatgaaagatttttctcacacgttcattattttccatacgccagccatgaacaaaaataacattaggtgcatcctcattactattcagataagcttcaccgcttaccaaatcattaaacaagtccccacttttcattagactttcatattcgaatttaacgattttatttttttgtaaattcgacacttcactattaaaatgcatattaattgttcgatctactttataaaactcattaatatcttcaaaatccatttccggaacccccgaaaattggtattctttgcttctttttttatgcaaatcataaagcgcgcataaatctattaactttgaaaacaacaattttattatccccccaaatgtatttaaataaaaaaagctcaccaactataaaaagtattctttcttacaaaaatactagattataattaatctgctcatcagatcttagcattatataatttgtactctattaaatcaaaaggtagaaatccccttatttcccttaataagatatatagaaaaggtaattcaatccagattaatcaaacagaagaatcaagcctagtcactaggttgatatttcataaaaaaaaagatagaatatataacataatatatataattaaaaaagagatttatgatatagttatttcatataaacaggaaattaagttcaattcatttaaaaaagacaaaaaataaaactccacccaccgttttcaattgattcgaagtttggcgactagatcaattgaaaacccacgttagcagagtttttttacaaaattaatattatggttaaattatatcataactaatgaagttttgtgaataaaaaactcgctaattttccgatatcgggctggaaatattagggaggttttttcgtgttattaaaaaattttatattaagcaaagcaaaacgagaactaagtcctcaactggatcgtatatctactaaaccaggaaatattaataaagccgtaaaaaaaattctaaaggagattgatatcattcttttagaagaccagggctttactactgaagacatttctttacaaactcctcgtaagtacaaaggacttgaaacaattttatcttatcttgttcacgaaggtttttcttgtgtgaaacaggatgtgatagcccaaaaagcgggaatttcaaaaccccttatcaatgaaactctttcttggctagaaaaacttggtatctgccaccaaattagaaatcgtaaagctggaaagaaaggtccttctgtatacattttaacaatacataataattatcaaaaaatcatagattactttaaacacaaatggcatctagcaattgagataacagaaactatctcaaacctaatatccaagtggactctattaaaagaaaaaaaagaagaagttacagacgaacaagtagatacagatccaaaacaagaagaagctaatgaacaaagtgaagaacctaaagactattttgctagaaaagaagatttcaatgaatatttaagtaaagatcaacaaagagcatggcactatattatgagttctccatttactaatctgtctgaaaaagatgcatatgcaattgcaaatagaatgccaccagatatcgacagagatgcttggtatttcttcagacaagctgccgatcgttttgaagctagtaaagctgataagagtaatgctgcttatttcattgaaatatttagccaaaactataaatcttatttaaaacgtaaaaaagaagaagctgaaaaatatgtttcatctttatcaaaaccaaaacaaaagttaataatttacgattttatcaaaggggaataatcttgcttaaaatcgccatttttatagccttgtttaaaaattatagcaaaacaaggctatttgtcatgcgcttatattatttcctaaatacctctcatacttcacatccaaatcaattaaaaataacagttaatttttagcatataatggaaaaacataaaaagataacctactaaaattgccgcaataaatgaaccgaaaattcagatacctcctttgtttctaccaaataactactaagaaaaaaaatcaaacttcttgttagagtaagggttaagtgccatttttaatttctaatgtatttaatggttttaatttttaaaacaagatttattaaataaaagaatcttatcataattcatcaaatttttttaaacaccttttgtcattctccctactgtttccctaatcctcgctaaaatagacacccaatatgtaaatgtcaagataaacatgtacattttcgcttgtttaagcatgtacaaaatcattccttagctgatattgttagtttcggcgtcgctcctgcgcttttatttcatacgatagcaacaccttctattttaacttctttggcatttatcctattcccaacaatgggtgctttaagattagctaaatttagtattaaaccaactattggatattttaagggattacctattccagctgcaggattatcattggctggtatggcattgttttcatatagtaatgcatggattactttaatcctcgccctcttaatggtaagtcccattaggtttaaaaaattttaatgaaggtcacgcccaacgccattaaggagcattttaaatggatttaacgcgtcaataagtataaaaaagcgggacaataatattaaattaggtgcccttcgaaaaattaaaaccttgtatttatggctattgggttaatccatcgatatgttattctgaaacgtcaatccacttttaacaggagctccctttatcaagagagctcctgttcttatttcttcttcttttctgtcggttggctttgtttagcaaaattagatgaatcatcaaaattcggttgctttttaccagcattattacttctaccttttcccatatgtaatgcacctcccctcccccttactattcccaataaaaaaattctcttgcatccaagagaattttaaattgggttcttattgatactacctaagtacttccaacactgccatttcataaaagatggatccaatgttaaattatttaatgctaaaacaaatattacattttcatatttaactggataatcaattaataatcctaatgtatttcctgaagctgcaacaattatgattcccttttctaacacgtcatctataacttcttttaattattcttacctagcatataatatttttctacacattgagattgcttgttgtataaggaagcttttcttttttccatgcaagaaatcctccctttaaattcactacttcctttataccagctctttgtaaaatactagctgctatagcggaacgtaatccggttcgacattgcaaaactattggaaaatctttcggtatataatctagttgttcaaatagattacctaaagtgatatgtattgcatcatgaaggtgtccttcctcccactcttttttactacgcacatcgataaccttaacgcttccaccttttatatgcggatataattcaatcgatgttttttctttgtaactttcaaatctatcaagtctttgtattacttttaagggtgcaaaagcaataatattatctaacccaatagattcaaattctctaataactgcctctactttaaccttttcctcatctagaattattaaagtttcttttttataatctaataaccatccacaccaagttgtgaaagaattgttataaggtatgttaattgacttctcgatatgacctgcagcaaaactctctacatcccttatatcaactatttgatgaacgctcttcaaaatttcttgaagttcttctactgtattaatagcagtactttttctcttcttacgaattggcggaccatacttatttaaattcttcattaatgaaaaatactttggaggctctggctgtcccgtcaataaagtcgatataaaatcactttcttcattacactgaaatgcccaattgaacatcttttcataacctaatgtagaagttggaattgctcctaatgcttttccacatgcgcttcccgcaccatgtgatggccatatttgcaaataatcaggaagtatttttattttttgtatagaattaaataattgtttcgctcctatttttgcagtatccttaataccgactgcagtttctaataaatccggccttcctatatctcctacaaatataaaatcacctgtgaatatccctatcggcttatcattcgtataattattttgacttgtatcagttattaaaaaagaaatactttcaggcgtatgccctggggtgtgaattacattaaattttatatgacctactttaaactccgtgccctctctaaccaatttgtatcgaccttcgttaagatattgatatttccaatcacaatccccttcatcagatacatataaatttgcatggtaaagagtagaaagttctctagacccagaaagaaaatcagcatgaatatgtgtctcagccgcagcaattacttccatcccctctttcttagcaaattctatatattgttctatatagcgactaggatcaataacgattgctacgccttctttctgacaaccgactaaataggaagcatgtgctaatttttcatcataaaaatattttaaaagcatatctattccctccaattagttatttcaaattgattttcaatttttgtaaccattttttatcttctcctatagaatccctttcaacattaaattccaatacatatatggcaacatatatcttttaagtaaaaacatactatacctttctttcgcttgattaaatggaaacgtttcttgtggctcatgttcatagttaaattcagcgagtataagacttttatatcctgtaacaatcggacatgatgtatatccatcatatttagcctgtaaatctcttccgctaagtacgtccataatattttgttttaagacgggtatttgttttcgaattgctgctccagttttagaggtaggtaaattggtacaatctccaagtccaaaaatatttttatattgcacatgctgcaaagtataagggcttatatctacccatccctgatgatcacttatctcactctctttaataaaattaggtggccccattggtggaacaacatgtatcatactatatggtacggtttctctttttagtgtttgcgtatcttcaaaaattgcctctctcttttcggcgataatttccactaaatttttattataattcgttataatttgctttctttctagtacttgttctaaagtatttgcatatcgtggaacctgaaatatgttattgtttgcagaataaaacattacttcacttctgtttcttacaccactattacaaaaatactcctctgctaagtacataattttttgtggagcaccaccgcatttaataggagtattagggtgggtaaaaagcgcatttcctcctttgaatttttcgatttctctccaagtagaatcaacatatgtataagaataattgctacataccccattagtgccaatagactcttttaaacctttaatactgtcccaatttatttgtataccagctgctacaataagaatttcatattcaagtaacagtccgtcatctaaaagtatcttattttcagatggaaataacttaacaacacttttagggatccacgttgccccttttggaataagcgattcctgattacgcatcgtactttcctttgaaacaattcctccccccactaaactccatagtggctgaaggtaatgtttttttgatggatcaataattgctatactttctttaaataggggtacatttcgtaataaatgtgcagtagaagatagtcctgctgtcccagcaccaattacaataattttataactatctctggtcttcattatcctcttcctatctaaaattgatttttaaattaactaattagtagccattttttcatcgtagtaacattattataagttaaaaacaccatagttttatctgatttaaatgaaaattttgttaattttaccatcaacattactatatgcgtaaatcccttatgttacttccatattttagttttaatattaaaactttatatttttatataaaataaaaataatatattaaaatacttttcatgaatccggataagtaatgttaaaaaacaacatctaacatcttagatgttacaataaacaaattcacatacttcacaaatatgaaaagtattaaatatcacttaagtttcgttaccttttcttctgtatatattgataaaaaattgtgaaattttatcgcattatgcaagacatttaatatcaaatatattactttcactatgaactaaatggtttataggaaatttatagataaataaagtgctaaattgactcttatgcagtaattatcgtttaatttatcgaaaaattgaaaaaatatgtgtagatagatatcatttaaaatacatatataattaattttaattttccgacacgttttttcacatagttcttaaactagttttttgcgtgcattatgaaaaaaattgtaccgtgtcaatcttaaaaaattatatatcataactttaagagaggaaggaaaactatgaagatgaaacgaaaaatcattatgacaacagcacttgcagctacgttagctacaggtgcactacctactacctcggtgtttgctgcagaaaaggaggctcctattcaaccaaaagaggcacaattaagtattcaaccttttgcacaaaacaatttggaaacagccgttcaagctgccttaaatggtccagaagtcaaaaaaatcaaagtatttgaacatgaatttaatgtaaaagaaatagaagtagtaaatctaggtgcaggaaaaaaatatgttaaggggcaaatctctcaccatttaagttttcgtccagatgatcaattttattatgagtttacagtacaagatggaaaggtactagataaacctgtatttaatattgatagaggtggttggacaccatttgctgctccacttttatcaattcttgctgcgtataatggaattccagttaatccaaatgatttaaatgcacttggtcagcagattggtaaagttatagatggaagctgggaacatgcagctcaatcaattgcaactgtagttagtctaagttttaatgagtagaatttttcaatttttattagcagtgtagagatccgctttttgtaatcagccttgttataagagattctaaaacagctattaataaatttttaccactcaatcacattatcttgatttgtttaccaccttatcattcattatatgtcacaaaatagaagtcttttttaggacttctgttttgtttgtattcaatacgataaacagttgttttttggaggctatacttcgagttttcaagaatccgtttgactattagggacaatttataataaaaaattattaaagtctcaaataacttactcccccctattgttaattatttttaaatacaaaaatttattatcttaagaatgaaaaacaataaatatagtaaaaaatcatctaacaattgtttaaaggtcaggagagaaaaaatgaacaaaataaaaatgagaaatttctttaaaattagcatccttacttgtattacactagcaagtttaaatagaccatctactattttagctgatagtcatccaggttactcctatgaatccaatatagggtatcaaaatccatcgtggatgtcgaaaatagaagattcaacaaaaataagtgaaatatctattccagggactcacggtacgatggctttacatggagcgagttttcttgatgaaaatttgacaagaaatcaaactatgagtttatcccaacaattaaattccggaattcgatatgtagatatgcgtgttaaacgtgtaaaagattcttttgcaatgtatcatggcgttgtaaatcaaaaagctgtgtttgaagatgtgttaaaagagaccattcaatttttaaaagatcatccaacagaaacaatattaatgcgcttaaaagaagaaactactcctgaaagtggatctctatcatttgaggagatatttttaaaatataaaaacgttaatgcttcatatttttgggatcctaattccgtaccaacttcagatagaaataaccctactttaggagatacccgcgggaaaattgtaatcttacaaaactttacatccgctcaattgtacgggattgattacgaaggtttgaatatacaagataaatttgaaattggaagcggaccagacgaaatatatacaaaatggattgcgataaaaaaccatctacaaaatacaaatactaattttaataatgaaaaaatttatctcaaccattttagtggtacgggaggcgcagccgcatttttaaataatgtatatccttggtttgttgcaagcggaaaagagagcagaaatactgacagtagtcctaaattgattcaaacgaattccactaatgcgtggagtgattttcctcgcgatagaaacggacaagtatactatggggggatgaatacacttgggaccgaactcttacaacaaggcgcaattaaacattctggtatcatcgcagctgattttcccggtccaggtttaattgatagtatcattaaattaaatggtatacattcaaatgaaaaagaaatattaatttcacaaatatcatctgaatctagtcctttatcagggcaacaaaatcgatccagccaaaactttaaaattgatagtttacctgtaggtaccaaagaattaaaatgggttattgagccttcagaaaaagattatccttctactatttctttcaatgtaatgattgatgtttccctaggaatagattctactcgttggaaaaatattttacatgaatctaggactgaagcttacacaaatactaaatattatattgcaagtccaattggtgccactagcaaattcacagtgaaaatatatgctattacaaattagaaaataaagaatccaaatggaattcctttttgatggaataccattcggattcttttttgattttaattcgttaacattaggatgatgattaaatttattaatataccatttaaaccattagataattcatgcttggaacgacccttactttttaaagagcaatccaaaattgttaactacctttttcagcttatcacttattcaaaactggcttccaaagcgataaagcaaaaatccaatttgagtcgccattcccttgatgattttgaaccgcttcgtacactttcccctcatgtactactctatcacctttagtatatgcttttcttgcatcccatttttcatatgcgggatcctctaactttgttgttacattcaaaacatcacttctactagattcatttccagctaaatcaaccgccgtcactacatatttatacgatgtattagccttcaaatctttatccataaaagatgtattagccgccgtcccaattttattcataaccccagcgctttctctatatacaatataatggtcaacacctacattatcttctgacggactccacattaaattaacagttgtcgctgttgtacccatactatgtaatccttttggctgagttggagcctctatatctgggattgtatgtgttgtcttaaccttcagtttttcactttcttttgatatgtttccagcagagtctaatgcctttattgtataagtatattccgtatctgcttttaattttttatcaataaaagttgtacctgataccgtatcaattacttctccattacgtaacacttgatattcttttacacctatattatcagtggaggccttccatgttatttcaacactattggcagaaactttagaggcatttaattcagttggttgacttggagctactgtatcaggagtttcattatttactaaatttacatcaactacattataaaaagcgtttgacgtatctgctacatcccatacagctaaaataacatgataaccattacgatcagttggtacattaattgtatgtgttaaattatttgatgcggccgaaccgtcatgtttcacagttccgattggttctaattcagcacgtgttaatggtttgttaggatcccatccttttttggtaatgtaataatgccatttacttgtagaatgtggcgctgtatatttccatgtaaatgtatttactccacctttaattgtgtttttgaaccaacgatttgatgtttgttggtcaagaatacctccaaacaatcctcctgccgaagcaatttccccatcaatcggtccactatctggaaatcctttaggtgcttctagactttgaggttcatacattacatttccacaatttaaatttaatgccccataattctgactacataaagcagcacgactactcggcttttcaacaaacccatgtgcatacgcactttgaggagtcattgtgattgccgtcatgcctgcagccaaaacacaagcaccaatcccctttttacttgttcttaatctttccaatttagatgttaatttcaatttcatttttgtccccccaatatattgctttcgctaatataatagcaatatagggataaacgaacaaatcgtcaattaatatattaatatctctcataaattggtacatttattattatttttaatctcctataaaaataaagtaaatacaattaaggaattttgtaacattatgtattaaaagaagaataaaaaccccatttaatttcacaaaaaattcaaatattaaaacaaaaaaatcctcatgtaggaaaaataaattttttatattacaaaaagaaaaaaagtctggaaaaaaccgattatatccgtttcttccagacttccgctacttttataccactcacaaatcctttaaccttaaacatatacacttgaggttaaaacacatataatacccctactaattcaaactaacgcttaattacttataaaataacttaaggtatctagcttaactgtattttctttattaatagctattttctattctgtatttccttactttaaacagattatcaagaaattgttaacgtttaagaaaagagaaagtatttaaaaatctagttttaactatcaaattttaataatttattgtgttatttttatctaataaggcacagaaacaaaagatgaacttcagtgtgctttagaaaaggttcttagggtgaaacgtttaaagggtattttagtactgggtttttattaaatgttcctgtacctaatatttaaattaacggatgtcaaaatattttacaatacgagtattaaacgttacatatttttatataaaatgatacatttcatcaacacgcctcttctaatctttatgataaatatagaaaattcggctctttaggattttattttagaattctcataaaagtatataatagattagacacataattgtcacaaattaatagtttatctactttatgattacctatgaaaattttattaccacttcaatatttatcgataaactaaagcactctatacttacaatttcttaaaacccttttaaataatctttcaaaagagtcgctagttttatattttttatttttttattgtacatttgtacatttgatgttaggattatgcctattaaaattgaatcctaacgattcttctttataatttccatgttttaattgttaaataaaaatatagattctgatatatatttaaaatcagaacgaaaatgtcgttattttacaatgatttcgtggaatacctttagaatggaaagatatatgcaacaacgtgttaagggcttacagggggaacaaaaatgagagacttttttgatgataagtataaaaatattgaattaaaaaggaggttaataaatttaataagtgaaattagcgaattcaaaggaaaattagctgcttatcaggaacaaaacccagacatatttaatagcttagaaaaaactataccactacattacataaaaaatttcacaactatttatgaggatataaaagttcctaataaaagattaaaagaacttattttagatgatatcgtacctcaaaatatttcggaagatgctattttttgctattatcaaacactttcttttgtacataaaaactcctgtactttattaatcaatccagcaactatacaggaattacattttcaactaatacattacattacctctgacagtgccaaatggcgtgaaaaaccttttatcattccaggaattccagaacatggaatgcacttgaatagttaccgcattcttccgcatgaacttattccacagtttatggagcaattatgtgatcaatacaactcattaaatactagtaaggggctacattcacttttattaatagctcgttttatattaaatttttattgcatagtccctttcaatcaaggtaataacaggctggcatttatgttaatgcaattgctgttaattaagagtggacatacatttgtaaaatatgtatgtttggataaatatattaagaaacatgaatctgattattacaattcgctttataaatcttcggtgaattggtactgcgaggaacataataatagcttttggttaaaaacgtttttaaccattatattagaggcttacaaagatcttcataacacagttctagattctatatgtaaacatactaaagttgagagaattcaggattttatacttaaacaaaaacaaccctttactaaggaaagtattcgtaacacttatccagacattgcagagagtacaatcagtaaggctttaaattccttgcaactgtttggccatattaagctagttacaaaaggaagaaacgcaaagtggattaaaatttgaccatactttcaagatatctgagcttcaaaaattcaataataactttatcattgaatttcattttaattttaagctattattacttttttagttatttctaattccaacaaaacagtttataggaaaaggtccgcttccctccgccttttcctataataaaattaaatatagacatagaataattgtcgaaaaaagtcgtattttaatattttttctttattttctggttgtaaacgtttcactttcatgttaccatcttaatcaaacaatagatggtaacatgaaagtatttctttcccttagaaacatataaacgtacggtaatatcaagaaaataaggccaaagaaatatttgatacctaccaaaataattaataggaattttgcgcgttttttctgttaattcagaaaaaacattttgtccctaaacaaaatttgttagcgcgcaaactttaattacactagaacacccaaataaatgtactgtctttttaattgagcattaagatatgaaaaaagagttcttcctacaaaattcagctgatgaacttaaagatatctaaattactaccttaaacgccatctattgttgacaatatatttatcaactatgaaaaagagcctatcaagggttcttttttgttatgatcattcaaatttcaattctatcttgatacttagattcccccacaaatcacctctactttttttgctctcaattattaatttccgttcccaatttaattgaatttgtgaataaaattccatcttataaaaataataaatacaactaatcgttatatattaaagaggtgtcaattttgtctttaaatgaagagattttagaaactaaaacagataaaaacattgaaaagatccaaacaaataacttaaaacaacttaaaaatacactagataatatctttgatattagtgcagatttaattgaacatcctttgcaattaaaaacaagcacaaatattttactatattattttgaaggacttacagatagtgtcgcattaaaaagcaatgttgttacaccattattacaaaaagtgaatgaagacagtcaaatatttaattctaatattattgctactcataccaaaatagtatatacatggaatgaaattaaagaaggattacttgaggggcaatgtgtactatttatggaaggagaaaatcggtcacttctaataaatacaaaaggctgggcagagagagcaattcaagagccaatttcagaagttactattaaaggatcacatgatggtttcattgaaaatgccacaaaaaatataggcttaattcgtcgatatcttccttctgcagagttaaaaatcaaaaagttgacgattggagaacgggccacttctttcgtatacttaatttacttaggtgatgtagcaaacgcagatgtagtccaagaagtagaaaccagaatctgtaaaattaaaacagatgcaatattgagcattggtgaactatctaattttacaaaggatcaaaattggtctccttttccacaggcttatttaagcgaacgcccagatgctatttcaaatcatatacttgatggaaaagtagcggtgttaatggatagatcccctggcgcaatgattgttccaatgaatttaattggattctttcaaactccagatgattataatattcattggctcgttgcatcattttttcgcttattacgatttgcaggatttattatagctatttttttaccagcattttatatagctatagtctcttttcactttgaaatcattcctatagatttatacacttctattgcaacgtcaagagtcaaagtccctttctctcccttattggaagcttttataatggaaatcacactagaaatgctacgtgaagcgggtattcgcttaccacaaccaattggacaaaccattggaatagttggaggaattgtaattggacaagcggctgttcaagctggtcttgttagtaacgttatggttatcatcgtatctattacagccattgcttcatttattgtttctaattatgatttatcaagttctatacgccttattcgttttccaatgatgttattggcttacttttatggcattgtaggtattgttagtggattaatgctcttatttgctcattttgtttcactaacttcatatggttcaccatatggattgccaatcgcgccatttcgtctccaagagttaaaagattcttttgtaagatttcctatttctatgcttaccagccgttcgagtacagggcagccgaaacaaagaaagaaaaaagaaggtggttaacatggggaatcttaaatttaaaaatataactttattcgaatttattattttcatccattcgctgcaacttgcatctggtatgttaattatgccaagcccacttgcaactactgctggcacagatggctggatttcaatcattcttggatggatggttacttctataatcggtgtatttattatattaatgttacaaaaaaatcctaacaaaaatttctcacaaatcttaaaaacatactttggtaaatggatagggacaattctttttcttacatatgccttttatctattttttgctggatttaatactttattaaaggcaactgatattgtaaaagtgtggatattcccttccactcctgcttatcaaatcaccatattattactattaccttttattattttagccttgagtgggttaagggctcttactagttattctatgcttgttttcttcttcactacttggatgccactatttcttcttttttcactaaagagtaactacaatcctttacacctactacctatttttaaagagggattataccctattttaaaggcaacaaaagaaactattactccttatgctggcttagaaattgcatattatatatatccgttcttacaaaaaaaacaaaaggccataaaaggactactaatagcgaatactggaaccatgtttttctatctatatgttactattctttcttatatatactttagtccagaggggataaaagacgtaatttggcccgtatttcatttgttacaaggggttcgtttttctttcatggaacgattagaaattatttatatcgcttactatttaattgtattctccactactttatatccgtatttatttttcagttttgaatctatgaccatatcacttcaaaaaaacgcccgaaattgggcgctgcttgcttttatgttatttatagttgggctatttattttcctaaatcccgatgtggatgaatatttgtttatatattctcttatggatatcttaaatgtcattttctttattctattaccaatcttatttttcgcttacagtattctttttacttggattactaggaggaaacaactttgattcgaaaatggatatggattgtaatttgttgtgtgtatataattggttgtagtcagagaattcctcttgagaaggtttcattaatccttttaattggcttggatagaacctctaatggaaacataaaagttggaacaagcataccactctttcatcataagcagcaaaaaagtactatagagcattggacacaagcatcaactgtatataatggattcagtaagatagatacgaagttaacgggatatctgacagcttccaaagctgaaatcattttaattgggaaaaaattagcgcaagaagcaaattggttgcaggagcttgattcttcttaccgtgatccttacgctaccattaatgctaaagtagtacttgtagatgggcctgcagaagaaatttttaaaatttataagcctagtaaaccatcactatcatcttatataaatggtgtaatcgaatcctcaattcaaaataaccaatccgtctcttctacaattcagcaattaatgagagaacaaaatgaagatggaatgacgcaaactgttccaattatcaaaaaaacaaagaatgaaatcgacacagtaggaattgcatttttaaatcgaaaagggaaatatttgacttatatccctaaaaaagatgttaaatttttcaatcttataaataagccaaaaagtaacgggcgaatgatactacaccttgcacttcctcctaaaaattccaacaaaaaaacaaatacttctatcttcgtacagaacgcgacaaggaaggtagatgttacttttcaaaacggaaagtttgtatttaatctcgatatatatgctaatgtagctttaatagaaaaaaccaatcctaatttaattaaggggtactatgataataaaaaaaatataaataatttaaaaagtgctattcaaaaagaaattaataataatttacaaaatatgttgtatgaaatacagcagaataaaattgatccaatcggattatccctatatgctaaagcatttcaatataaagagtggaaaaaagtaaaaggagattggtcgcaagcgttagcagaggctaaaataaatgtaaagacacacgtcaaaataaaagatactgggaccattagaaattagtctaatatttaatagcatttcttaatagaattttccctcttcaataattattatgtaaaagatactaattcaaagaaagatctaatggttaaatgctaactactagatctttctttttatctaagtatttttttaggattacaattttcctatagtaaacaagcacaggtttctaaattaagttactggagaatatataactctggtgcaatatccctaccagctttcattccaataataactccatgatataacgtcaaagatgaaatcccttaacttaggtatttgactttttaaatttatacaaatgtcttagctctatgtactgtgatatataggtccacatcaatatgttattgcatcatatactgaacagataatttaaattacttttataaaggatgatgaggatgaacttagaagatatacaaaaatcctatggcgtaattgtaagtttaggaggattgtgtcaagtcaccaaccaaatcaaaagacacaatttaagaacattttctggacctttagattggttttattatccatcactttcagatgtaaacagattacttcaaaatcgatttaaaaaatttatgaagttggaaaatatggttatagaaggttcagaaagttacggtcttattgaatcagaatttgataatcaaattaaatgggcagaacgaattacctactgtataaaggacacttattataattgtttttcaatgcatgattttcctattaattcagaaaaggatttgaaatcaacctatccttcttttaaagctaaattagacactagaattaatcgattctttgaaaaaataaatagtagtgaatccattttattcattagaatttggggaaatcgagatgaagcggttgaattacaaaacgtattatctaaaattacaaataaggattttaatatccttattgttaatttcaaggagggtatatctaatattgttgaacaaaattggggaatatcgagggtttgttcaattgaactcccacgttatcaggatagatgggaaggtgatgattccgattgggatgttattttaaacaaaataacattaacttaataattttcttcttacttttaacatgatttggcccgtaaaatcaaataggtgtagagaaataaaattcctgtctaattgatacacacttaattaacaaaacgttcatataataattcgtaagtccttctttattgaataaatagttctttacaaaattagttccatcactagagcacctttatgcggtgctcttttttgaatttataaaatgtaaaaatagttgttccattttccttcaaatggctaattccctttgttattcttctgttgatttctgtataatcatttatgcgatcagcatattctgcttatgtagtgcattcacgactacttacttccatactttatcttatattttgtcttcttggatatttcattataagcttcttcaattcccttgatttccttccccttcttttatcttaagaacaagcaatttctttcatcaatattaaataaactaaagcatagattttaaaagaacctaatttacatataattaatgataaactacaatgtgtattctccacgtttaatcaacatctgaattataaatctaacatattttttttagttgattgtcattatgtataaatgctaacttaaatatgtacattaacgcttgaataaatatgtacattttcgattttgtacatgcttaaacaagcgaaaatgtacatgtttatcttgacatttacatttatattcgtgtaaaataaaatgagaacatatattctatataaggaggcaatcaaaatgatagctgaaattgggaaactaaatgatggatatattgtgaaatttgaacgccaatttccatatacggcagaagaagtttggtctgtattaacagaaaacagtaagctgaaaaaatggatgtccaatttacagattgaaagccttaaaacgggtggaataataaagttcgacatgatgaacggttcattcataaacattgatattttagagtgtcaagtaaactcagtacttgaatttacttgggataaagatcgtgtccgatttgaaatacataaagaggaaaatggtactcttttattccttaaagagtacattcatgaattaacagatcatacaccgagagatatagctggttggcatatttgtttaaatcttttttcttacgttttagaaggagaagagaaagaattttctaaagatgaatggcaacagtggtttgaaatatacaaggataagattcatgaagtgagaggataattgcataataggtaatattcattatgtaattattatattgcaaatatgtttttaatgagaaataagaatagaggttcatatgaaggtaaatcaattgattgctagtcgcgatcgaatcaattagtgaatttttataacctaaagaaggaagaggatataaaagtaaataaagaaatataattcaaacgttataaacagttgactctcacacaatgtcattgtttaagataaagttgagcttcaaagtagatgtaacttataggaggaaatcatgtttaaaataggggatttttcaaaactatcttccattagtatacgaatgttgagacactacgataaagtggaattactacaaccagtaaaagtcgatgagcagagtggatatcgattttattcagcagaccaattaaaaaaagtaaatcaaattcaaacgttaaaagctatggggtttaatattgctaccatcaaagaaataatagaatgcgataatatagataccataaaagagcaatttttaaatcgtagtgctcaaattaaagaagacatgaataacctccaaaaacaattacgtctcctcgaagactcaatgaaaacgatgagagaggatgttgttgagatgaattatcatgtttcaataaaagaaattccagaaagaactgtagctagtgttagaaagattattccatcgtataattgcgaaggtgatttatggagtgtattaatgcaagaaattcaaatggaaaatattagcattgcccaaccgagttatagtattgcggttttccatgatcgtgaatacaaagaaaatgatgtagatatagaaatacagctaagtattctaggtaagcacgaaaatacaaaagacgttacatttaaaaatatggaatcgactaatgtagcttctataacagttaatggaagttatgaacagatgacagctgtaaatgaggctgcggcaaaatggattgagacagagggttacaaattagcaggcccgatgtttaatatttatcatgtgagcccagcgatggaatccgatcctaataagtgggttacagaagtttgttatccagttaaatgaagataaagaaaaaaggcattatttatatgccttttttctttataaacttatccataaatatcaagataaattacttcttgatttgattcgtcaactactagcacaattttatttgcaaatgtacaaaatgagcggattataatggattcctttaatgaatcttctaaaaaccaacctgttggtaataaagaaatgcaaccattttttggaaatttcagcaatgtttacattagcaacaaaagccaccgtaataaggggcttttgtcttaaataatttaatgatatgtgtaccctccatctggaaataatacattacccgtagtaaaactattttgcattaaatatagaacagtatgtgcaatttcattattatggccaggcctttttacaagagaaagagatttataagattcataagcagctagtctattttcgttttgttcattctctctttgtatcgttccaggagaaacaacattaactcttataggagctaattcaacagctaaagctttccctaagctttcaatagccctattacaagctccgtaagcaggcgcacctttaattggtctttgactaaaggcaccggacattaacacgatcgatccagagtttgaaagaaaagggatggcatattttacggcataatattgaggccaaaactttccgatgaagctactttcagcaatttcctctgtagaggtaattggtccaagtgtgtaagaggctccgggtgtgaataaatgatcaaagttcccaactgtcttgaaaaaattttgtaattgctctttattttgattatccaatacgtaagtgtggagatgattgctatttattaattttttagcaatctttaatttttcttccgaacgccctgcaataataatatgtgcaccttgtttaattgcttgtgttgccgttgctaatccaataccagaactcccgccaatgataacaatacgcttatcttttaatgtagtaatagacatattttagccactcctttaataaaaaactttagaatataacttatgcttttattattcgctaaaagggatcaagtgaaaagtacgcactttgtatgtacatagtcgcaaatttcgtactaatcgctatttacgcggataagtaataagaaaaattgctaaatatggtttatcccgcattaacgggcagtaaaactctcacctcaaagttaggaaaatgcgaggaagttaggtgagagatcaactgcccgtaaacgcccgattggttcaactaataaaaagatttatgattattgctgtaaaatcttaatgtattttattgtaaaagctgcttttcgtttaaggaaaggcagcttttttatatggaaataatgcaggggaaacttaaaaaaataaaaataagtaaagtgttaatcaaaaaaatgaaatatggagcataattgttttgaaacattactgtactagcaatgaaagaagctaacatattcatactaaagttgtagtttctatataaaaaatccatccttccgtttgattttatctatttataagtgtaatacaatacgaatagataataagaaatgagggagaatgtaaagtgattacacatatatcagatataaaactacaaacggtttccatagaaggggtaaaacaagtgtataaggacatattatcttttccaataaaaaaagaaacagcatccttcattcaatttgaagtaacaccttatacaacaattagttttcaagaagtgtatgaaccaattgcacctgcacattttgcttttgaaatcccatattcaaaatttcatgaaacagcaagatggcttgaggagtctggattactcattgcgaaatggaaagatggtcatacaattgatgaagaggatggtcgattcaatttatactttaaagacggagatggaaatctactcgaaattatcgcgcatagttatgttaaagaagatgtattagtaccgcagtcacctttaaacattttatatgtaagggaaattggtcttcctgttaaaagtgtacctatttttagggaatggctgaaatcaaatctaaatatgaaaacgatggaagacggggatatttttaactttgtagttggtggcactgcttatgtcgtcgcaacttggtggcagcgaccttggattccaatcgcgatgaaagctttaccaccgaaagttcatgtttctttcggaacagcggatctcgcatttttacagcgaatccaaattaactttaagaaaaataatgtgccatttgaatgtaaacataatgaagtgtcatttattgtgcagggatattcattttctattgtgtatacaccagagtttcattccaatattcctagcaaaataaacttaccgctttctatatagttatagaaagcggtaagtttattttgttttaaggaaaattaaagtctagttattatgttgatttaacatttgggctattccttgaccaaatgaccaattctccataggtgtctcgtgtagtgtaatgaaaacatcagcagtagagatttgtaaagtattagctgtactagtggctatagctttatataaatcttttttttgattaattgttctcccaggtccacatgtaatagaaatataaatcatattattggatcgttttaatgaaccttctaaaagataagatgaattataaaaaagttgatgagaaggataaggtaaaaacatttgaaaataatcattttcgggaatattgaaatgttcaattaacgaatggtgaatttgattgcttacattttttaataacttattatcggataatttttcaggatgataaacagtgacaaatggcataatagaggactcctttccttttgattttattttacttccaatatttccatttgtataattgaaaatatattaacgaattatcaataaaatcgatgaagatggtgtatgaaatggaaatgaaagagttacttacatttaaaaaaattattgaagaaggaacgttttcacaagctgctaaacaattaaactatgcacaatcaacagtaacaacacatataaaaaagctggaaaatgaaattggttttctgttatttgaaagaggatgggatgcaagattaacagaagaaggaaaactttttgcagaggaagtagaaaacttagtaacacattgggaatattctataactcaagcacaacgtattagtaatgaagaaaaagggagtttgagaataggcctattagaatccgttgctaaaaggttaataccaataatattaaagtttttaaatgctgaaaaaccatatatacattgtgattttgtagtgggaaatacagcacttttatcagaaatgatagaacataataagattgattttgcggtgtgcggaaataatgaaaataaatcaaaggtacaattcaccccaatatgtgatgaacagattgaatttatagtgaataatcccgagcatcctttgttacaaaaagaatccgttgaagcatttgatattatagattatccagttattgtaggagaaagtaattgttattcgtatcaatctgtaagttctctcctagcgaaaaataatttattttttaaaagagtttataattgtagtgctttaaacctcattccagaaatgctttttgaaaatgtgataggaattatcccgaaaggtacaattttgaatgaagaaatactatcttttaagattaaggactttaattctaaaatcccgattggtatattaatttctactaaaaataacaattatttaagtcaaacgaaacaaaaaattatcaacatcattaaagtcgccctataattatgctgaaaaattatatggctgttttcgatacgtacttttcttttagcatttcagagatttttgtaataataggatttatgtgagtagaaggatttcctaacattgcagtgaatttaaaataggggtgtagaatactatatggtttaaggagggtgaaacttgaacttaggtgagccaatggctaaaggaaatacagcggaaatttatctgtatgataataagattgtgaagttatttaaagaatatcttccaggtacagagtctatgaatgaagcaaaaaaacaaaaatatgcttattcatgcgggctgccagttccaaacgtatttgaagtgacaaagatacacgatagacaggcaattattatggaatacgtaaaaggtgtcagctaataacaatgaattgctaaataaattaatgcttcagtattgtaattaaatgagtaaaattattggattttgtttacaaagaatatagtagtaaaaaaggagtctgttttatgaaaactgatgaatcgatttcattgaataccgaatttgagaaatccgctcctgcgctacaactttcgaaattacataagcgattcggtgaatttattgcagtaaattgtattgatttaactattccaagtggttctttttatggagttgttggacctaacggagcaggaaaaactacatctttatcaatggctgttggtttgttacgaccggatggcggaaacgttaaagtttttgggattgatgtttggagtaatccaaaacaagctaaaacgttgattggagtattaccagatggattggctttaccagaaagacttactggtcgcgaattattaacatatatggggttgttaagaggaatagatgccaatgaagttgctcagcgggcagaagaattacttgcagtattagagttgaataatactgaggggactttagttattaattattctactggtatgcgtaaaaaactcggccttgcacttgcacttcttcatgcgccaaaattactcgttctcgatgaaccgtttgaggcggtagatcctatttctgcaactactattaaaaagattttacagaaatttgttagttcaggtggttctgtagtattttctagtcacgtcatggcattagttgaacaactttgtgaccacgttgcaattatttcgaaagggggagtactttcatctggaaagatggaagatgtttgtggtgaagaaaaactagaggatattttcattcgattagtaggtaaacccgccgctaaaggaggggaattgtcttggttaatgttttaattcaaatgaagttatcaatacttaaacattcaatgaatcgtggcagggcagttctatttattatgacaggattagttggtttgttgctagcaattggaactattctacttttttctttttatccaacagaacaaaatatatcaaaaagcattctatatgtaacattcgccatttggacagtaggatggattataggtccgatgcttactggaggagacgaaatattacgccctgaatattttgtgttgcttccgctcaattcttataaactagctaggatgcttctcggtgtaacttttataggagtaggaccactggttagttttttagcttttataggattattaatttatgcagctagaattagcatatatgcgattatagtagcagttccagcaattattttgcagttagtttttgtagtattgttatccaaagtaatagttagtattatgggtgaggcgatgaaatcaagagtcggtatggaaatgggagcgatgttcattggtttcatcattgcatttctaaatgtcggctggtatgcacttcctgtaatcaatagaatcatatttagtgatactacgctattttacatgattccatctagttggacgatacttgctgtagagtacgctagtcaatctaattggttattagcttttattttcttaggtacaataacaatattttgtgggtttcttttatttatatggactatattattgactagacgtaaagagatagattcaaaaaaagttcaagtgaagattattaataagcattatagaaaggcttttaaaatcttttttgaaactaaaataggagctgttataactaaggaacttaaaagttggagaagagatccacaacgaggccgtttcctgcgaatgggcatatggataggtgtattttatgggattttagttacgattgctaatataccttacttaatgccttgggcggggggaattatggttgtatttacaggtatgtttgcttgtaatttatatggtttcgatggaagcgcgttatggttaacgttggtgacacctggcgcagaaaggattgacgtgcgtggccgccaattagcttggttgatagctattggtcctgtggcaattttaactacaataattttcactttttctagcggacttactttcgtttatccatgggtatttgcagtagtcccagctttacttggtggggcagtcggccttattgtcttattttctgtagttaatttaattccaattactgatccacattgccgtggaagaggaacgataatatctggtgacgatatgaatgcgagtaaaatgtttataaccacgtggctcatgctgttgatggtgctagtaacaacgataccttcgttactagttatatggttggggacatcattacatatacaattcatacaatggttaggtgtaccgactggggcttgtacgggagtgtttttagcatggctatttgggcgtatcgcttacaaaaaacttgaaagaaatggccctgagttgctatttgaaatgaaaagtgggatgaaaattaacagtgataattacaaaaagaaaattcgtaataaagaaatggaattaccgaagaaaaaacttgccgttgttattcttcttgtgtttatgggaatctttttcttggtgcaccaaagtatagtgccgattgtctttgaaatatttgatgtggatgaaagagtccgtctattttttcttccgcgctaccttcctcatattgcccgcattcctgtaagtatcattttcgctgtactaggtatagtgtttttgtataaagccatattaattaagaaacagcacgtaaaagaatcacaactaataaaagatgatatgtaaaacattaccaatcggtcaagtttttagcggatgttgttcaactatagttacgtagttaaacaacattcgctttacatatttattaaagaataattattttcaagttttaacctataaagatttattatccgtacttgttcctccgttaattcttctttatcccaatacatatgcattaagctatattcaaaaatctcctttaatttaataaataatggaaacttgtctatcatctcttttggtagttcattttcctcttggtagccttcaaatagtgcttttgtaatagaatgttcatagtcaatgatattcccatttccagcaaatgaatattctatcgcactataaataggaacggctaaattgaatatgtaaaaatatttttggaatgaatccaagagaataccaacgaacaacatgcctattcaatcatttgttaaactcaatataaataaagaaggggagttcaaaatgaatatttctagaaaattagaggttgaacagttacgtaataagaatagtgagctatttgataaagatgtacttaacatattgaatggtcaaatgatgtatgaagaatttaaaacggaggagctaatgggtgagtctgattatgccccatttaacgaggccatgtgtgtaaatagcgttactgcacaagtttttgatgaagagtttattaaaataagagcagaaggtcataacagttcagtcgaaaattatgcaaaaaaagttatagatccgttagaaaatctatttgcgaaaaagtataaatgtattgttttatggttcggtgaagatatgttttgccaaatgaatctacttactttactttcataccttgagcagtcgtgctatgaagggaaagtatacttaaatagtttcagggaggatgaatttaaagtaaatcaaattgaacttgaattgggggattattctactatatacaatgaagtattagtaaaccataaaaagacttatcataaagtaccacctgtaatgtatcaagctatagatttatatttagaaatgctaaaagaagataatatcgtaatgaaattcatctctaaaaataaaggtttatcaaatcaagaattattaacaaagttgttttatctttttccaacaatcggatatggtgatactcagtacatagaactgattaataaaatgaagaagaaaactacacctaaaatataggtgtagttttcttcttataattgctcaagtaattctaattctttttctacaaatagcattagttctttaatggtttcaccagagaaatcaaaacgaataccggctgcatcatatacttcttttatagattgcgagcttcctagtgataatgcctttttataattttctagtgtttgcttaggatcctctttatattgtttatacatttgtaatgccccaagttgggcaatcgcgtattcaatataataaaatggtacttcaaaaatatggagtacaggtaaccaactcgttgctatccagttttcgtagccatcaatatgtatgacgctagattgataatgtttttgaagttgtaagtatttttcatttctttcttcagaagtatgaattggattttcatacagccagtgttgaaattgatctacaataagcataataggtaaatatgaaataacatctttaaagaagttaatttttgcttgttttaaatcttttttgtctgtatagaaggtatcccaataattaagcgagaataactccattgtcatactggctagttcagctgtttcagctggaatttctatatactgtcgtaattctaatggctttatgagttcgttatgaatactatgacccatttcatgtataaaagtgataatatcatcttgtgtataatttaagttcataaaaatataagataattgtgaagctggtaagtactcacaaaagccaccagctgcttttcctttgcggcttgttaaatcaagacaattgtgtttatacattcggtttaaaagtgctgaaaattcaacatctagtttattaaagatatgagtgctcttttcaattaaatcattttcatttgcaataggtttaagtactttttgatctggagttacagctgatacatcccaagggcgaagtgtatctacttgcagtttttcttttttctctagcattattttatctttaagaggcacaacatacttacgtatggattcggctagttcatagcaatctatcgctgaataatcaaaacgctcgtattttttgaacatataatcgcgataattctctagttgaatattttttgctttttgatggcgaatttcaattaattgatttaatatgttttggagttctttttcaacagataaaaattgttcagaaataatagtttttgcctttttacggatgtcacgattcgaatcttgtaaataggattgtaattctgttatcgttttttcttctccgtcccaaatggcacttaatcctccagtgatttcaaagtactctgtgactaatttgtcttcctgtatttctaattcaatattttcctcacaaaataacttttgagcattttttatttttgtatctaataaaccatatacgttagaatctaattccattcgaaaaggtgactctaaatatttattatccaataaattttggtaccgctttaaaagtggctttacaaattgttgatcatgttcaaatgtatcctttatttcttcatcatccgtattacattgaaaggcgatgtaatgtaatcttaattgttcttcgatttcccaaattacttttgactgctcttttaaccaattttcaaggtctagttttgaagaaatcatcttatttaataaagtcgaaagagttttttccaattgtagtacattactaatatcaatcgtatttacacgttgcattatatatccctcactttttatttattcatagagatattctatttattaattgtaattcccttgttaagtggggaaaatgtgaaataatgttaaatttaataattatagaaggtatttatatgtcaaagtaaaaagtttatcgtaaatgaaaatgtgtggaggggtgctacatgagaaagggaacaaaggtacttgtatttttaattccatttgctttattatgtgcctgtgagaatgagattgaagatgctaaaagtgaagattctatagtgatggatattgctacagcagcggtaaaggaggaatctttttttagtgctgctatatgggatgaaaaagcaagaatagtagatttagaaattgctgatagcgaaaatgctaacgaaataaaaaagaaattaataaaagattgcaaattcaaggtattatgtcctataaagtaaatatatctcaaagaaacaaggagattgtaaatgcagaacatagatgggagttagtttttggacagatatttgatgacgtattcaggaagaatggatatgaagggtttgggattcagcaaataaattataaaaagaatcaacctgttaccattgatataaaaactaagattagcgatgatgaagtaggggcgagagaacttggacagaaaatagaaaaagaagttgaaggggtacttaaaacagaagcagtaaagaaatggattgaaaatgattcatacgctattgggatttacgatatagatgatcggaaaattaactaattgaggaatgaatgctatatgaatataaaatcgatataattaaatagaaaattgctgaaggaggtgtaatatgtataagtatttacatattttaaacgacatagaaaatatgattcaaaatggagaaataaatgaaggaaagaaattaccgtctatacggtcactcgttacgcaatatgaatgtaataaggcgacagttatacgtgcgcttcatgaattagaaaagcgtcatattatatattctgtccctcaaagtggatattacgttgttaagaaatctgggagtaccatagaaaataacgagataattgattttgcttcctcagcaccagatccagatgttttcccatatttagattttcaacattgtattaataaggctattgatacgtataaaaatgatttgtttgtatatggaacgccgaaagggttaccatctttaataccagttattcaaaaacaactagcaaattatcaagtctttacaaaagaagaaaatatttttataacgtcaggtgttcagcaggcacttgctatattaacttctataccatttccgaatggaaatgaaactgtattaattgaacaaccaacatatcatctatatattgattatctagaaataaataaagttcctgtaatcggtattaaacgtacgaatgaaggtatcgatttgaatgaattggagcaaatatttcaaaccggaaaaataaaattcttctatacgataccgagatatcatcatccgcttggaacgtcttattctaaagatgagaaagaaaaaatcacactattggctaagaaatacaatgtatttatagtggaagatgattatttagcagatttagaaactgattcaaaagcagatccgttatatagcttggataattgtagtcatgtcatatatttgaaaagttattcgaagattatttttccaggtttacgggttggagttgcggtcatcccacgatccattgcaaatgctttctatacatacaaaaaaatactagatattgatagtccgatgatttctcaagcggctttagaaatttatataaagagtggtatgtttgaacgtcataaaagtaaaattaattcttcctactacaatagatcaataaaactagcagaaacattagaaaaagtgcaaaataaaaattcatcattatttacatataatagacaaaacacacttggaatacacacttgtttagaaatgcagaaaaacatagttacagaaacacttatacaaaaattaggtgacattcaaataagtgtcgatactattgataagaattatatgagggattttcctaaagaaaaactattaaaattaaatgtttcgaatgtaaaagaagataagattgaagaaggtattcgtaaagtaattgaggaaatcaagcaatcaagacagttggattttcagtttagaaagtaataatttgaattaggaggtttgttgtgagattgttttacaattagttactccagatggagaagcctatatgaggaaatatgataggaagcatataccagaggttataaagctgaataaaatgaaacgattacggagaaaagtagcagttgtggccggagcaactatatatgtaactgaataactatatgttttttaagagcactcttagcaaaaagtgctctttttcattaatgtaaatatttacttagcatctttttaaaatgatttttatcataatttacatattgcgtagctgtatttcgtattgaatctcccgcgtaaaatctttcgtataattcgtgtcttgatcctaatgggcttccaataatatcccaggctaacttaaataattttgtgcgttgttcggcatctatatttgttcctttaaagtgctttttcaataaatcatctattggactctggaagtcattcgagctcgaaggaagttgaatgaaaccacctgctccaattaattgtaaaatttctattgcacggggataatatttggaaccaagattccttgcagtttcgatatatttaaattttggcaaataagtttttgtttcatttgtagtaccttcaacttctgcagcaattaaaagtgcgcgaattgtttcgatttgcataattaattccccaagcttctcttgaacatgcaaataagtagtagcaccgattgcttcagcaatttcacaagcaattgcagttataaattctagctttactactaatcgtacaattgcttggtgataagctaaactactagaagctatatctgactttattgcccataacgcttcagggttgttatatagtaagacacgttcccatggtacaaatacattatcaaagattaatagtgcatccatttcatcgtactgtgagctaagaggggaatcaactgtaattgaatgtgtattcgcaaatggttctctacaaaccatatgtaatccaggagaattggctgccacaatgagaaagtgagctaaatctttttgagtatcagtcagttttgctaatggatagattaataaatcatgtgaataaggagaagcagtaccgatcattttagcaccacttaaataaattccgtcagaagttttcttcgtaactcttagtaatcctaagtcatttgtattcaacattgattctgtagatcgatttatttgtggatcacgttgaactacgcttaagaacaagtgattatctctcgcttcttcataataagatgtaattttatctggaaactgtacatcgaattttttataaaaatattttgatacgtaccagccggtaagtctcgatcttgcgtaatcagatagtctactcattacaccgtctgtagcataactccacgtttcaaaagcggttctcctcattaataattcgttataggaattcggaattaaaaaggccgtatggacaaattctttcgtttttgggctaacatatccaatagaatctcttcgtattggatcatcaaacaatgaaaataaattagaaatggtacttaatgttcctgcaaaatgtttgtctgtagttacatctactttttgtccatagagccaaacgttacgaccatcttgtaagctctttatatagtaatctttcaaattttgcatatttcctccttctaaagactattcatatatttggacatcttttaatgggggggaatatacgtggaaagttattactgccgaatctgtagcattatacattttatgcacagtatctttttttactgtgaaaatatttccctctgtaaactcttcaatccgctcgctattattttcgtacgttatattttgtagcgtaccattgactattagtatacatcctacagatattccgtgatcgtgcacaaaagtctttgctttgctggggaaatttaatactaaaatctctacaaattcagactgatagataacgttccgtccgtattcaagattaactggtgaagtaataaaaggagatattttatgaagtgaaatatttaatgattgaatagcgtgtattaaattgaccgtatcgtagttacataggttattaaacgttttttgtatgttatgaatcaattgcatgtaaaacttcctcctaagcatgtacagtaaaagaaaacctaatctaatattatatagagcgtattgaattacataatattgtattgaaacatttccaaaaagttacttcttttacttaggaagttcatttaatttgaaaattccggtaattagttccgttaaaatgatatgcttgaactatatattttttatcccgttaaatcccgactggtgagggctgataatcagtggaggatgaacaacccccccactgattaaagtttcactttattggaaaggtgatgaaataaatggcagttcttttagtggaaaatctatatcaaatgtctattgttttactgattttatgttcattttgtttttatagatatttaaagaaaataaaaaaggtaagaaagcttacaggttttgaaattacgatgtatatcgttacgcaacttgcgtatttcatttgggcggcaacaacttttcttaaaatgttatcagaataataatgctgttaaacaatagtgaaatagaataggttatctatatttttctaataaagaaaaaagggggagtatttacaacttctacatttaaaagattggtttttaagtgttctgattttgaatattaagtttccttctttttaattagaaattatgagcatcttctgattttaaagacatcgattatatttggatgagattacacattcttaatctcttatattgtctctaccccatgcccatcaacttaagaatttgcactacccccaagtgtcaaaaaacgttattccttcttgatgttgcctaacttttttcaaaatgtcctttacaaagggtacagattaataagagcgcctcttttttatttttcacgtttttctttaattgctactgtacatcttgatatacatagtaaatcatcattttcatcaataatgcgaacatcccaaaccattgtcgattgtcctctatgtattggtgttccaatcgctgttacaattccatctttctttgagcgaatgtggttcgcattaatttctaatccgaaacaaatacatttttcttgatcaattaaattatatgaaccaacacttgccactgtttctgctaatgcaaccgatgcaccaccatgtaaaaatccaaatggctgatgcgtacgctcatcaacaggcatcgtagcaaccaccttatcttctgtcatctctaacaactcaattccaagtgaatccattaaagtttttgccatatcgcttcccccttctcttactttaattaaatgtataattttacctatttattttcaaactacttataacacttatataaggaggcttcacctaaatgaaacagaaattttgtatattactgcttatgttctccttgctgactattgtaccaaattgtgcaataacagccaaagcatctaacctgacaatcgatgttaagactgtaacgcaaaaaggtaagaaaccttatatagaatatcaaataaacaggccttattttcacgaattttctgactctaaatttcaaaataaactcaatttatactacaaaaaatccactgacaaatttaaaaccaaattagaaaaagaagcaaaaaaatattataaagagacagaaggatctagtacaccatttcatccgtacgtagcaaatgttgattataaagtctctttaaacaaaccaccttttcttagcctatatgtgaattactatcaatatactggtggagcacacggtctttatacgtggaaggcaaatacattcgatttaaacgaaaaaaaggtactgcacttagacgatttatttcaacaaaaggataaatataaagatgtaatccgtgcggagattgtacgacaaattaaacaaaatgaaagcatttattttcctgatgcaactgaaaaagtaatgagtatgaaaaaattccacttctttttagagccagacaatctcgtcatttatttccctttatatgagattgctccctattcaagtggaattccgcaatttcgtattccatatacgttgctaagagactatttaaagccttcttatcaaaatattttgattgacaacaagtaaatattttcgctacgataatgttaacctaaaaacaacaggaggttaacattatgagaagatttcatgttttagatttagcattagctgccatgttcgttgctcttatggcaatcggtgcaaatattgtatcttgggcaccattccttcaagtagcaggcatcccattatctatgcaaccatttttcgcaattttagcaggtcttcttcttggaagtagacttggtgccttatccatgactgtatatatgctcgttggcgtagccggcgcaccaatcttcgctaacttcaaagctggatttggagcacttttagatcctactggtggttttattatcgcatttattatcgttgcttacgtatccggaaaactagtagaacaaaaagaaagaccaacattcattacatttgcaattgcctctttcacaggaattattttaacttatataatcggtactacttacatgtacggggcagtcaatctctttatgggcggtaatatgagctataaagctgcttggatgattatgatgtggtttgcagtaaaagatattgcatttacaattatcggtgctattatcgcacctcgcatatattatgctgtgcgtcgttctgcttatcagcattctcattcgacgatttcataataaaaaaatgagttatttcagtatactgaaataactcattttttattatgactcttgattcgcttgttcttctaaaattttcttcatcattgcaaccatgtcatcacgtaattctgggtgttgcagggccatttcaattgtcgtttgaacgaatcctagcttttcacctacgtcgtagcgctttccttcgaaatcgtaggcaaatacacgttggatttcatttaagctttggattgcatctgttaactgaatttcaccaccagcaccgacatgttgctgttctaagaacataaagatttcaggcgttaaaatgtagcgccccataatcgctaagtttgaaggagctgtaccttgtgctggtttttcaacgaaattgcgaacttggtaacgacgaccttcttgttctaatggatcgataattccatagcgatgtgtttccgactccggaacagtttgtacaccaataacagaagaaagtgttttttcatactcatccattaattgacgtaaacacggtttctcagcttggacaatatcatcacctagtaacactgcaaatggctcatcaccaatgaatttacgtgcacaccaaacagcatgtcctagtcccttcggctctttttgacggatgtaatgaatatctaccatttttgaagaagcttgtactttttcaagcaactcatattttttcttctctaataagttttgttctagttcaaatgcgttatcaaaatgatcttcgatagagcgctttgttttaccagtaacaataataatatcttcgattcccgatttcactgcttcttctacaatgtattgaatcgttggtttatctactatcggtaacatttctttcggcattgctttcgttgctggtaaaaaacgtgttcctaatccagctgctgggattatcgcttttcttacttttttcatcacaaaataccctctctcctgtcggaatcaatagcaagcatttcctacataaaacaaaagggagatttcgctcccttttgttccttactacttaaaattactttgtattataaacgattcataatgtcttctttaatagtaagtaacttttgttcactattttgtaaagaactatcttttacaccaaagtaaaacttaatcttcggctcagttccagatgggcgtaggcagaaccatgaaccatcctctaattgatattttaacacatttgatttcggtaagtgaatctcttctttatgtccatcttgtaaagatgtaacgatgcttgctttatagtcttccactgctacgactgttaagcccgctacttctttcggcggattctcacggaacgttgccatcatctcttggattttttccgctccatcttttccttttaacgttaacgatacaaggtcttcacggaagaagccgtatttctcaaatacttctaatagaccgtcatataacgttttcccttgtgatttgtagtatgcagctacttcacatgcaaatagaacagattgtactgcatctttatcacggcagaatgggcggattaaataaccatagctttcctcataaccgaattggaattcatattgtccgctttcttcatactgtctaattttctcaccgataaatttaaatccagttaacgtatcaactgtatctaaaccgtatgcttttgcaattgtacgaccaatttcagacgttacgattgtttttaatacgacaccgttctctggaagcgttccgttttctttcttttgagatagtaagtaatcaagcattaatgcacctgtttggtttccggttaatacttggaactcaccattatgattacgcactgctacaccaagacggtctgcgtcaggatcagttgcgattaatacatctgcgcctaccttttcaccgtcacgaattgcatactcaaacgctgcgtgctcctctgggttcggtgattttactgtagagaagtttggatctggtaactcttgttcttttacaactgttacatctgtaaatccaacttcttttaaaccacggcgtacagaaatatttgatgttccgtgtaatggtgtaaagacgatttttaagtctttaccaaccttttgtaccatttctttattaatgatgacattgttcaattctgcagcatatgcatcatctacttcttgtccaataatatgtaataaaccgtcagcttttaattgctctacatcagcgacttcaactgttaattcatcttctactgcatttacgtagctaattaactcatctgcttcttttggaggtaactgtccaccatcttcaccgtatactttgtatccgttatattcaggtggattatggcttgccgtaagaacgattccacttactgtatgtaaatgacgaactgcgaaagaaagtactggcgttggacgtaagctttcaaacacatatgttgtgataccgcgtgcaccaagtgtagcagcaacttccattgcaaactcaggtgatttatgacgagaatcataggctacaacaacaccgcgttttttcgcttcctcacctaacttttcgataaagcttgctaatccttttgttgctttacgaactgtatatacatttaaacggttcgtaccagcaccaagttcaccacgcataccacctgtgccaaactctagatttttataaaagctatcctcgattttcttctcatcttgcttcatattttctagctgttcttttaattctgcatctaattgtgcgtaagaaagccagcgactaaattcttgtttccaattcattcttctctctcctctcgctcgtcatacctttattatatgaaaaaaacatgctgtatctcaatattttataaaatctaacaggattttactaggaatatttgtatacactattgttaaatactccactaaagggaatgaggattatgcacgaatggggcttgtcagaagagctcaaaatacaaacaaagcaaatgattgaaattgctgaaaaagaactatcgattatgaggaacgcaatcgataaagaagacgaatgtattttatgcaaaatggaagatattcatcatatgttagcaaatgtacaaacattggcagctacatactatattcaggcatatttatcaccttatacggaaagttcatcttttattacgacagctatccaacatttaagcgccagaaaacatggtgctcttatcgtcgtggaacgaaacgagacgcttgaagctctcattcaaactggaacgacattaaacgctcatttaactgcgccattactcgaatcaatattttatccaggtaaccctcttcatgacggtgccgttctcgtaaaaaataatcatattgtctcagctgctaatattcttcctttaacgaaaagtacagaagttgatcctgagctaggaacacgtcacagagctgcaattggcttatctgaaaagagtgatgcacttatattagttgtctctgaagaaacgggccgtacttcttttgctttaaatggggttttgtatacgatttctttataaagtgaaactttaatcagccctcaccaatcgagcgtttaccggcaatccgacctaactgctttcctttcgctgaattttgagttatgggtcttactacccggcaaatagtgggataaacaaacctataaaaaagaagactgttccaaaatatcggaacagtcttcacttatactcttattcttctccaaaacgctccacaagtgttgcaagtgtacgtaccattgcgccagttgctccagctggacctaagtcgtgcgcaccttttgtttctgatgttccagcgatatctaagtgtacccatggtgtatcttcagcgaattcgcctaagaatgtacctgccataaccgcatgtccttcacggcctggtgagttatttaaatcagcaaacttactgtttctcacacgttctttatcacgatcaaaaatcggtagttgccaaattggctcatctgtttccatagaagcctctagcacttgctcaaataactcttcattatttgtcattgcgcctgtcgtatagtttccaagtgcaacaattacaccgcctgttaatgttgcaacatcaacaaggtagtttgcaccaagttttttcgcatacgtaataccgtcagctaaagctagacgaccttctgcatccgtatttaatacttcaattgtttttccgctcatagatgtgattacatcgtctggcttaaatgccgtaccacttacaacgttatcagttgaaggaataacagcgatcacattttgttctgggcgaagttcaccgataatttccatcgcacctaatacagcagctgcaccgcccatatcacctttcataccaaccatgccttcacgtggttttaaagaataaccaccagtatcgtatgtaataccttttccaacgaacccaatgacatctgtccactcttcttttcctttataaataagagcaatcatttttggtggctctacactaccttggtttactgcaagtaacgcacccataccaaggtcttccatctcttctttctcaagaactttatagtccatatcatatttctccgctaattcaacagcatactcagcaagctttgtcgctgttaatacgtttggcggcatatttacaagtgtacgagctgaatttgttgcacgtccatgtacgtagccaactgttaatgctgcttcaatttcttgtgcatcttccgctgtaatagccgtgaacttctctaactctacacgatcctttttatctgatttatacgtttgtaactcatatgtaccaaggccttgtacctctgccgcaatatgagcgacatcaatcgcgtctaatttctctgttacgaaagaatcaagtaagattgctgcatctcgtacttttgctgcttgcagtgttttaaacgccttaccaagagccgcacgtaacgtttctgtcgtgtaagattctttctttcctaaaccaacaaagtaataacgtttcacatttattttccctaagctatgtactttcgaaatggcctttttcttcgtagataattctttctcttctagtaaaacttgtaattgcccttcaaacgctttgtccagttcttgtacaaaactactcattttctcttcttcaaataaagcaacaattaccgcttcatgacctgctaattctttttgtacttgaaacatgttcagaccccctaaatttctctaccaccattataactttattttcgataaaatgcgataattctaactacagttatatggcgtgtaaaatcgcagatccaaaatctcctctatcatgaaataagccaagaaaaaaagtctagcgtaattacgactagactatctttgttttaaatattgaccacgaaacacttgcatcgtttcgtcttgatttaacatcgttaactcttcttctgtaaatttaccatttcctacttttactacgtacacatttacttttttcttaccccattggctataaacatctttcaccgtatcataatatagatcaagacggtttccttttattgcaccgcccttatcagctactacaccatacccgtaacctggcacgaagagaatcgttccaatcgggaatacgcgtaagtccgcagcaattgtggaatataaatcccttttcactttgacacctgaatatgtaataccatactctggatgccctggcctcttaccagttgactcaatccccgatgtataacctgttgcagtcatttcaattgaacgatatttagaccagtcgtttgcctgctctaaagcatttatcacttctttactcggagcaacatttctcttaacttctgctgcatgtacttcttttgcactcattccttcatatatctttacaatctctaataaagaaactcctgtgaaagcattccatgttacgcataatgcaattgcaagtaaacaagtcatcataatgcgaatacaatatcgttttaacatttttatattccacactccttcatcgttaatcattccctatacgatgaaggaatatgcaaaaaaataatctccaacttaattggagattaaaacatttgatatccgcttttccgaagtttcttgattacgactcctgctaaagcagcccctactaatccagtagatagaataaatacgtctgcttgtcctaagtgcgatacacttgtcccaaatgaagaaaatgtttctttcggttttgaaaaataatcccacatactcgctttattaataataagcatacaaacaatcggatacacaataaccattacccaagtagctcgcaaaatcatgttgagtaaaaatccaattccaaagaacaaaataaagaataacatcattgaaataagtagtaccggtatactcactcttttcccctctccttcgcacgtgccgtaaatacgtgataagctgtataaccaaatggttcacctggatttaatgttttgtccacttcaagatgtagttctgatcttccttctaacaaatatttaataagcacagacgtattcggatcgtctacaatcttatccggatgtaagaacgccacttcagacaattctttctcctgtacaataatattttctccttcaggttccaaaaggaaaataatcatattatcactaatctcattacgaataacacccgatcgaacaccaataatccccttcacatgagcgacaatgcctgtctcttctaacacttcgcgtttcacagcttcatcaaccgtctcaccttcatttacaaaaccagccggtaaagaccatttcccttttaatccactgtatttcttcttaacaaatagccacctaccatcttttgtagctactaaaccactaacagctagccataccttccctcgtttctccatgatgtaataacctcctccatcagaacggacagaatattctttcttttttatatattatactatatttttaatatgaaaaaagcagaaacagctcttagccgtttctgctttttctactatatattaaaagaactttaatttaccttttttaagaactaataaaggtccacctaataagaataggtaacggttatcgattactttcttcatgaaggaagctttccaacctgttaactttttacccataacaacgcccattgcatcgtcatgacctaaagaacatacagatcctttattatcgaatgcgaatttcttcatctcgcccttgccacgaactaatacagttaagttgtgtgcaatattgtaaccttgttgaattgcaatttgtgctgttggtgggtaaggacggttaatttcttcattaataattaacgctgcgtcaccaaccatgaatacatcttcgtatcctggagcgtgcatgtactcatcaacttttacacgtccgcgcattgcttcaaagccagactcttccacaataccattaccacgaacacctgcagcccaaactactgtttcagacttaattaattcagtgtcatcgccattcgcaacgataataccttcttcagttgcttctttaattgctgtaccgatgcggaattctacaccttttttctcaagctgttttacagcgtattctactaacgctggatcaaaacctggaagtgctgttggagcagcttctacacagatgatacgtgctttttcacgtggtacattatactctttgcaaagttcaggaacacggtttgcaagctcacctacgtactcgataccagtaaatccagcaccaccaacaacgattgttactaactcatcgcgttgttcagttgcatatttagagaaactagcttccatatgctcacgaatttcacgagttgcattaatgttagcgattgagaatgcatgctcttttaatcctgtaattccgaatgtttctgattcgaaaccaagaccaattactaagtaatcatactctaactcgccatcttttaagataatgcgtttttcagcagctttaatttctactactgtgtcttgtacaaagttcactttatttgtatcaataacgtcttgaatatctagacagattttttcatcttgtaatgtaccagctgcgctctcatgtaaccaagtcgcttggtagtgatagctgttgttgtttactagcgtaatttcagcttcatttacagataatgctttttgcagacgaacagtcgtaatcatcccgccataacctgcacctaaaactacgatttttggagtcttcaccaaatcacaacccttttctttatataatagtaataaaaaataataccaagtactaaaaactctatttgtcaagaatgtggaatttatcacattctatatcataacaaaacgcagtcaaaaaatcgtacgaattttgtcatagaaatttaacataatacttccctatattagtcggttttattccagaattcaagcgtctggagaattatcaatattttaaaataacatagcgttttcaagggttttttagcctttttttcatgtattttcctttctgtatattttatacaataaaaaagaacctatgcgaaaacttacacacaattcagtcgttttcagaagtattatgaactcaaatatgctatcatttatttgaaagtgtcatcatttgcaggattttcgtgtacatatgaacaatatatgaaatcaatatcaaaattccatctatagggggaatgaaagtggcagaaaatcaaaaagtttacgacataacaattattggtggtggtccaacgggactgttcacagcattttatggcggtatgagacaagcaagtgtaaaaatcattgaaagcttacctcaacttggcggacaattatccgcactctaccctgaaaaatacatttatgatgtggctggatttccaaaagtgcgcgcacaagaattagttgataacttaaaagagcaaatgaagaaatttgacccaactgtttgtttagaagaagctgtcgatacgcttgagaaacaagctgacggtatatttaaacttgttacgaataagcaaactcactattctaaatcagttattattactgctggcaatggtgctttccaaccacgccgcttagaattagaaggtacagcgaaatacgaaaagaaaaacttacattatttcgttgatgatatgaataaatttgctggtaagcgcgtcgtagtatttggcggtggcgactcagcagtagactggacaatgatgttagaaccgattgctgaaaaagttacaatcgttcatcgtcgtgataaattccgtgcgcatgaacatagcgtagaaagcttaatgaattctcgtgcagaagtaagtacaccatacgttccagtagaactcattggtgatgacaagattgaacaagtcgttcttcaacatgtaaaaacggaggaaaaaattatcatcgatgttgatgacgtaatcgtaaactacggcttcgtttcttctcttggcccaattaaaaactggggcttagatatacaaaaaaacagcatccttgtaaattcaaaaatggaaacaaatattcctggcatttacgctgctggtgacatttgtacatatgaaggaaaagtaaaacttatcgcttgtggatttggcgaagcaccgacagcagtaaacaatgcaaaagcttacttcgatccaaatgcaaaacttcaaccgatgcatagctcaagtatgttttaatatgcaaaaataaagctccttccatacgtggaaggagctttccttttatataacataaaagcacactgagtccaataaactatcgaactcagtgtgcttttcgtctaaaaaattattgttttcttcttctacctaatacgaataatactccgccaactaagaatgaaattcccgcaccaactgacatcatccatgaatgtgctccccctgttttcggtaattctttttctacttttacttgcggttctttaattaacttttccagtcttacttccggtttctccggtttcacttctggtttcttcagatctttcggttcctccggtttcacttctggttccttcggctctttcggatcttctggcttcacttctggttcttttggttctttcggttcctccggtttcacttctggttccttcggctctttcggatcctccggtttcacttctggttccttcggttctttcggcccttctggcttcacttctggttctttcggttctttcggttctttcggttctttcggttctttcggctcttccggcttcacttctggttccttcggttctttcggctcttccggcttcacttctggttccttcggctcttctggtatcttaagatcttcttttgttttcggtaaaattgtaactgtaggctcaagtggtggatttattttatcgtccactaccgctctatttgttatccctttacttggtgctgcttttaccttcactttaaaaataatactacgttctttcgtatctgtaatttctagatactttgctattacttttccaaactccatttttaactctattggatttggttcagccccttcaaatctaatgctatcttgcacgtactctaaaccggctggaatttcatcttctacctttacctctgctagtttgccgttttctaccgtatttttgaaactaattcggtattctacttcttctcctagcttcggttctttattatttactgtcttcgtcgcttttaacttaccatctttatattctggctttattgtcgctgtcggttccataactggatgatctggatcatctacatgaatgatcgctttatttgttatttcctctccaacttttaccgattcttttacctttactttaaagatgatacttctttctttcgtatccgtaatttctggatacttcactgttacttttccattctcgactttaagttctgttggcacaggcttatcacctacggcctccagactttctttcacatactctaaaccagacggaatttcatcttcaatctttacatcaactaacttcccgccatctactgtgccgttaaaagtaattcgatattcgatttcttcccctagctttggttcatggttacttacttctttccttgcctctagtttcccatctttatattgaggtgtaattggtataagtgactcaactggtggatttgtcggattattatcatccacaaccgccttgtttataatttcttttcctacttgtaccgtttcttgtactttcactttaaagatgatacttctttttttcgtatccgtaatttctggatactttgctgttacttttccattctcaactttaagttctactggatttggttccggcccatcagactttatactatcctgtacgtattctaaaccagctggaatttcgtcctctacttttacctcagttagtttgccgttttctactgtattttcaaaactaattcgatattctacttcttctcctaacttcggttcatggttactcactgtcttttcagcttgtaatacaccctctttatgttgaggttgtatcgcgacattcggtttctctggtggatttatagtatcttccacaaccgccgtattcacaatcgcttcgccaattttagctttttctttcacttttgctttaaagacgatacttctttctttcgtatccgtaatttctggatattctgcgagtactatgccgtttttcacttttacatgcaacggttttggattatccccctcagctcttccgctaccttctacaaactctaaactgtttggtaattcatccttaattttcaccttcgctaattttccgtgctcaactacgttacggaacgtaattcgatactctacttcttctcctaattttggagctgggttatttactgttttctcagcttttatttttccattcttatactccggtgtaataatcgcttctggtttttgcggaggattcttcggattatcatcatccacaattgccgtattcacgattttcttcccgacttttactgcttctgttacttttaccttaaagataatgctacgctcagctgtatcagtaatattttcatacttcgctgtaatttttccagcttcttcttttaactctaccggatttgattcattaccttctgcttttaaactatccttcacatactctaatccatttggtagttgatcctcaattttcacttctgctagttttccgttttctaccgtatttttaaaactaattcggtactctacttcttctcctagctttggatcttttttacttacctttttattagctttaaatttaccagctttatgctgcggtgtaatatctacttctggtcgctctggtggattttttgtatcatcaacaattgctttatttacaattgccttgtccacttcaacggaatctttcaccttcactttaaagataatgcttctttctttcatgtcagtgatattttcatacttcgcactaaccttaccagcttcttctttcaactctactggggccggcttatcaccttctgcttttagactatctttcacatactctaaaccaaacggaatttcatcctcaattttaacctctgccagttttccatctttcaccgtattattaaatgaaattcgatattcgatttcttcacctagcttcggtttatgattattcacctttttatgagcagcaattttaccatctttatattgtggtgtaatttttgctgtcggatcaattactggatggttcggatcatcaacatggataatcgctttatttgtaatgtccttccctattgtaaccgaatcttttaccttcactttaaagacaatacttctttcttgcgtatccataatctctgaatactttgccattaccttaccattttctactttcaactccactggttttggctcttcaccttcagctttttcgcttccttctacaaactctaatccagctggaattttatcttctatttttacctctgctagttttccatctttcaccgtattattaaaaataattcgatattcgatttcctcacctaacttcggttcatggttacttacttcttttcttgcctcaattttcccatctttatattgtggtgtaatcggtacataaggctcttctggcagattctttgtatcatctacaattgcctcatttacgatttcttctcccacttttacgctttcttttaccttcgctttaaagacaatgcttctttcctctgtatctgtaatttctggatactttgccattaccttattatttttcacatgtagctctactggtttcggtttagaaccttctgccgtgatactgccctccacatactctaaaccatttggtaatgcatcctttatatttacctctgctagttttccgttttctaccgtgtttttaaaactaattcggtattctacttcttctcctagtttcggtttatgattattcgccactttctgcgcagcaattttaccatctttatattgcggagtaatttccacatgaggctcttcgggctcattttttgtatctactacgattgctttattaacaatctccttgcctacttctgcctcttcttttactctcactttaaagataatacttctttcttttgtatccgtaatttctagatactttgccattaccttgccgttttcaaatttcaattctaccggacttggtttagaaccttctgcttgtaaactgttctccacgtactctaatccagctggaatttcatcttctactgtaacctctactagttttccgttttctaccgtgtttttaaaactaattcggtattctacttcttctcctaatatgtaggaacaaagcatcattctatagagttaggatcagatagtttaatagagtatttattaactccaatgcgagcgcgtgatctacctggagttggagaactagaaacgtctctttatttgctatttaaggaaatgaagaaagacgcaacagttgccctttcaggcgaatccgcagatgaagtattctcagggtatccatggttccatcaagagaagtttctagatgcagagatattcccttggagtgttaatttatggtatagtacagaaattttatcagaggattttaaagcgaagattagccctgaaaaatatcaaaaacaaaaatttgaagatgcagttgctgaggttccctttttagaaggtgaaagtgatctgcaaatgaagcaacgtcaaatgtcttacatgtttattacacgtttcttgccatttatgctagaacgaaaagatcgcacaagtatgatgaatggctttgaagtacgagttccattttgcgattaccgacttgtagaatacctatggaatgtcccattcgaaatgaaaagcatagacaatattgaaaaaggtattttacgtagagcttttgaaaatgtacttccagaagatgtacgttatcgcaaaaaaagtgcatatccaagcactaaggatgcctcttatctacaaggtattagtgattggatgttacatgtgttgaacaatcctgaatcacctattttgccattaattaatgtagaaagagttcgtgctattgcagaaggaaacgacgaagtaatttcaggtaatgatgcaagaggtataatagattatttacttcaagttaatagttggcttcaggaatataatattaaattagtatggtagatgtaattttcaaataaagagaatagctgaaacattaatgacctaagtaaaccgcatttccaatggattagatagttatctaacaattggaaatgcggttttataaaaaataataatatgtttataaatgtaaaacctacggaaacttttcctgtgggttttttaagtagtttttacgaaattatgagtgttttttattttgtatttcaataagttcatcttgtaccatttttatataatattctttttctgttagttcaaatataaataatgcttttttccagttataaacaacatcttctacattgtgttgtttaatctttaataaacactgaccttttaaatagaatagttcacctaataggtataaagtatttagattaattgctaatttgatgcccctatcaatgtattttattgcctcttcatgttgatatatgaagtctaaacattttgctaaattgaaaatgatttttaatttaatttctttatctctaggaagatctaacttattaaaattagttaaacatctttttaatatcttaatacttttttcatattctttgttttctccatgaaatatagccattgtctgcataatatgtatttctctttctgataaaaaatcagaattggttaaagttagttttaatgcatgatttaaaagagttaaagcagtttttgttgatctatttacctcaaatatagcgatcgcttcatgccatattagaaattgtttctcttcttttgtttgaaaattatttaagtttttctctttttttactatttcataaagttctttatattgtttttgctttaagcaatcttttattacatattttacattttctgtatattttaatcttttgttttgagttagtgcaaatatatgattcggatcaatgccaagtctttctgataattgatataacaatatgctagatggataaatcacacctttttcgatcttgctaatttgactttgtgaacaaattccatgacacaattcggattgtgatatgtttttttttattctaagttctttaatggtaatacccaaatcgttaaattccattttttcacctactatttagcactgtattagtataagagctttctctaacttttaatgtaatgtaaaattaatatatttacaattattatttgttttaaaggaattaccgtttccataggatggtgaggcttttattatgtacaaaaaaagacaccctaaggtgccttcctccgacttgaaccacgttcatttagtataaacttatccgtattatccctttgttatacgtgtaaacacaccctataaaacagaatcgtctatatacaccagattgttagtttacaaagtacaagagatttgagatcagtattagagtgacgcgacaccttccataatgattggtatgttacgcctttcaaaagaatctgctttatagaatgtatccacgtttattattttactatatataaaattcattcggtgtattttttccagatatgtataattgcataaagttgatgggaaaatcagagtataatttggattgtgtaataaagataaggcccacctacggaaataggtgggtttttgttgggtattactatctcattgcacacaagggaatttctattaaaatcatagcatatttttatagttcttatattgagaaataaagaaaagacacccaaataagagtgtcttttcccatagttttttagcagaagcaactgcatccgataatgattaaaagtataaagagtacaacgagtaaagcaaaaacgtactattctacattatctgaattaaaggtagctacgaaaaatagaagtattcctgaccttgtaaagaaaggtattgtagatcgagaaggaaatggatttactccaggtgatgatgatacattttatgtaatgttcacattcgtagatagcggtgaagaccaaaatgtatttcagggagatgcattgaaattaaattgaacgtttaattccatgcaagcaagcggtgaagaaaagtaagtgtaataaatttgtatactctatgtttaaaattgtaacaagaagcataagatggccgttttgatcaacttattcctttttagtttgcggccaacgtatgctttcgactccgttgaataattaggtaatcatctacaaaaacgtatagtatacaattaaaagaactgttttaaaattgaggagtttatcgtgaatggtaaatattctcataaatatatgggcgagaaaactgatgacgatttccttttttttaatacatcgtaaaatatattttacgatgtatattgttgtatgttggagagtataggaatattaaataattatcctgcttttgagatatcttgaggggattttactcgtaatgtggaagaaaaacagttttggaaggtgctcaattatataccatattcattggtaagagagagaaaagaagtaaagaatcatgaatgaaaagggggggatatactatattacgacaaatgaagcctttgtatatgtgaagtagaaaaagtaaaagattacctgtaaagggtggttgaaacttggtcttactatttatttttttaatctctttttagagttcaactatttgtactagctattctataggagtaaggtttaaagcacgaaaataaatttcggtattatatgtaatgagttcttcttttttatgaacagataaaccactttgtaggatagctgtaatattgaactactcaccacttaacgtcctaacggactgtttgaagtgggagattcctgcgaacaccgatgtatccatcagttatcttagcaggctctacccgcagtccctacggtgagaacataagtatcttgtacgctgactcaccacactccctactttagcttggttttcgcgattttgagaagcgtggggcgatagaacgttgaagattttacggttgcaacgtttttctgcaaccaacctcatatcttcagttttcgaagagcaatctgtacaagtaaatgatagcaaatatgttggcttatgccaaccgacattcatctcccacctaaaattggcgtttcacaccttcacatttttgaggaaggagtcttctatcggaaaacgataaaactactattttataggaatacatttccgaatgatctattaccatcaatttaatatttttcaagtttcccaaaaactgaagtaattactaaagtctttataaggaaatagaaagctttttaaatcttgactaatatcttctagattcccatatatattatctgctgctaaattaatgtcctcattaaaattatatagctgttcatctacataactgaatccctcacagcaattattatgtatcaaattagatataaatggttttattttcaatacattttcttcatttaggataaatttatcccataacagccccagtattatttttacgggtaattttttatcatacgttccttttacgttttttaatttaggtacgatgtcaaccaacttatcattactagatagagaaacttctataatttcaatagaagggctatctaatgcttcaattgtctgatcagcccaatcaattatttcagtttttgaaaataaaccaatttgtaaccctatactcagaacctcagctattattttcatattatccatatataaaactccttagattttctggtaattatacatcgcagtaacctaaatttcaaaaggttgttgctagtatgcagtaactaaagggatttttaaacctaggatatctccacattgttagcaagataaaaaacaaaatctctcctaaaacgaaaaaaagatgaacaaaataataaaaaaggctcatttctatttcttttttagattccattccttagtaaaagaacttaatagatgaaaaggttagattgcacaattaattgggagatacgtacaagtaactttgaatctcttgaacaaatagttctaatttatcatatacagaaacagacataaaaaaaacatcctttcctatgattctacagaaagaatggcctgttttaatatttgtaggatagttttaaatacaaaaatatagaattgtgcaacttataaatgacttaatgtaaaatatatattgcatttatgttattaataatttaatatataaaatataagatttatggtatgaagttatgtttacaagtgaggtgtatttaatgtccgtaagtaaagtgaagtttgcaagggttgaaaaaggtctgacccaacaagggttggtcgatattgtaaatgttacacgacataacattagtattattgaaagtaataattataacccttctttaaacctttgcattcatacagctaaaacactagataaaagtttagataaattattttgggaggaattttaaaatggaaaaactaaaaaaatggttttcactcagtacacacccagatgaaagaattcaacaagtcgaaatgaaaatttgggctcaatctggaattattgtcctacttatagcttttgttgattttgtaataagaggagcatatctacaccgtccatttttagaatgggctgcttcattagccattataatttgttatatgatattcgtttttattaagtctattctaactggtgtctatgaaacggatattaataataaagaacaattaaaagaaaaattaaaagaaaaaatgaacaatacctttattttttgttttgtcgcaataggtgctaccacatacaaatataacttacctgaagatttcgttggatggttatcagtaatagcaagatttattatacttttcgctttcttatttggtattcaatatcttattacagtattagcatggaagaaatcaaataaaatttaataagtatagacaaaaaagcttatcttttagcacttaatgataagctttttattatttttttcatcttttttcgttttggtgtacaatgaatttcttagcttgatagcgatgggatagaaccacatcgccatcaagcggaaattttatagtaccccagaacaaaatttcgtgctaacttgtaacaaaaaaacatgtgaaattgcccatagataactatcttatattaattacataaactagtgtgtgatataataatataaagatattacatttaaagggggattcaaattggttaaaaacttacctttactaatagtgattttactacttggtataagttcttctacgttaagtacgaatggatacttttctccagttatagaagggtctttaatgattataagtattattttaaacattgctgcagtgataggtttatcactacacgttcttgtataccaacctatgaaaagatatgaaacaaatttaaaagagacatttaaataaaataattatattcgaggtaacaacccatcgttattgagctgaaaaatgtatccataaaaagaaaaaatacgctattctttctgtagaatcataggaaaggatggcgttttttattttagggagtattttgttctgttagcttgatggatgtgtggcggtaccctatcactatcgatttaaaagaatgactgccacgttttatgcaaatattaatttgttttgattgaaaatagattataaaattaatatttaaatataaagaatttgaatattagtatgttatcatttaaatgattcaaatatgtagtacaaagtcaatatttgtagctgagttcgtttatacatatgaaagaattaaattatgaaaaggcggtatttattatgaaagcaattaaattagcaggtttaacaattgcagcaggtttattattggcagcgtgtggtactgaagaagcgaaaatagagcaagacgttaagaaagaggaacaaaaagaaaaagttaaagcatttcaggcagaaaagcagcaagaagataggaaagtaactatgcaacaatcgacggataagtcaaaacagcatgaaaatgtagcaaaagaaacagttaaagaagaacaaaaagcggagtcaacgcctgttgaacaaccaaaagtcagcgggttaaatgaggcacaagcacaagaaaaagtggaacaatcgatgacagcacaaggccagggagcgcgtaataaagatgtgaaattaagccaattaggcatccaaacagcaaaggatggaataaaggtggctgcacaggcgcaagacgttcatattgaagcaaaagacagtctaactcgaattgttgttatcgttccagctggaacaacgaaagaaagagcgcaacaagtaggcaacatagcagcgcgccaagtggcaagttttggggctatgggattaaatgtagatttgaaagcaccatcaaaagactatttaggggaatattgggagaatttctctggtgatatcggtatctatgacagtaacgaaaaacaattagtacgtggatatatttccaagttaaatccaacaaaaattaaatggtaagaaaaacagagtccctacacaatgtatggggatttttccataaagaaaaaaacttaaggggtcttcggacgaatcgaattatcgtacagtaatgcatgttaattaataaaattaactatacaaataatttattatatatccatgtaatctagctgatataatatgtaagggaattattggttaattagtgatgtatatatgtaagattagggggatacataagtaaagttagatgctattttggcagttgtagaaatactcttcggtttttttgtatttataataactttatttgcttatcttttttcaacaggagaagaaaagcaacaagcaaaggaggatttaaaggagctttctaaaactgctctcatcccatttgtagtggttgtaatcgtaatattattttttgttgttaaggtgattgatcatgacaataaagttgaacaagaacaacaaaggctacatgaagagaactaccaatgttaccataatgatagtaattctaatcttgataaaaatctggaacaagatattaaataatatagataagaacctcgctatttctataagatggcgaggttcttacgcataaagaaaagacactctaaggtgccttttctaatagttttttagcagaagcaactgcatccgataatgattaatagtataaagagtacaacgagtagagcaaagcctccagcaaaaccgcagccctcgccgcaactaccaccatatcccataataatagttcctcctttagataagagaaaaagactagggggtcattccatgtgttttaatgggttcactttaccttatgtttttacgtatgaattgagcaggtccttttgaaaataagggagagatcatttaatgtgcttccccggaatattgattacctattttctaaaaaacaaactatttaattatatcaataataagatagattaatataatgtattaatcctaacagaagggaggattagccatgcaattagtttgttttaaattagtaaatggtcaatactttttagttgtagaaggtatcgaaattcctgcgccaattccagcgtttgctgcagctttattaattggtttaggagtaatcccactttgttcttaatttaaagaatttcaaacagctctatctttcaatcgataaccccttaagtatatgaatgcttgaggggtttttataataaaaaaagaaaagacgccataaggcgtccccacaattaggtagataagactttagttttccaatctaaagaaattttgtatcagttctttgaaaaaatatcataatatccaattgagttattatgcattattacattcttctctcaaaccttctagattctatttgataaaatagaatcctaatattactaaaaatcaaataaatgtttctaaaaaccctaaatatttataagggtaacaaaagtgatacatttaaggtgcaaattataaaaaatataaaaggagggtgaataaagcggtatttaaaaagggctattataaacggtgagcagttatacagtatatgaacctgaatcttgttaaaaaatgatactcatttgagtgtactttctgatttgaaccaacttgattaaaataatgaaaaatcatcatttgtttattctgatttctggaaaagttttaatagtttcatgctgaacaaacatactttttagaaagaggagagattattgatggataatcaattactatatcaacagcaaaaaagagaaaaggcacttgtgattggagctggtattgcaggcttacttactgcacgcgtgctttccagttattttgagacagtgatagttgttgaaaaagatgagttacctcaaaaaccatctgaacgtccaggtacaccccaagactttcatcctcatcgtgtattaccacgtggagaaataattatgaaccgtttctttcctggatatgttgatgatttattaaatttaggggcccataatgtcaagaatgataaaatgattcgattttctccgtatggggcactggaactagttatagaacgaaaaggtgcagcaagcagtcgagcattgttagaatggacaatccgccaacgtgtgcaagaaattcctaatgtacatttttattcaaagcaagcggtgacaggccttttagcttcgtctgatcacaagcgtgttattggaattcatattcaagaacgagacgaattaaaaacaaagcgaactgtgttaaccgatttggtagttgacacatgtggtcgtcaatctaaactcaataaatggcttacatctatgggctatgatgttccagaaccagaacgtttaaaggtgaattttggatatagcacgagatattataaagtaccttcacatatcaaagagaaattgagtgcaatttctgaaggagatcctgctaaaaacgttggagctgtagggttattatatattgaagataacatagctcaagcgctactatttgttgctggaggtatgcactatccaccaaccaattcaacagaatatgaaaaagaactggactcattagttacccctatgatgagggagttaattaaagagttagaaccaattagtgtcccaagaggatttagagcgcaggagtcaactcgtcaacattttgaacaaatggaaaattggccatctggattattagtgttaggtgatgctttttgtaactttgatcccatttatggacaggggatgaccgtagctgccattgaagctgaaatgttagatacttgtttaaaagaacattctactcataaacctggattcgaacgcaaggtgctgcaacgtatgcaacaagctattgagccggcatggtggctgagttcaattgcggatttacgttggaaaggtgttgaacatgtaggagctgttccactcaaaggtgtgaaatttgcacagaaatattttgctttatatcttaaacaagctgcaaagcaagcaaatgaaggtaattcatccatgctccaaaaatatataatgatgaatgggctagttcattcgcctcatgaaatcattaactcagatatgttaagaatgttaatcaatggagatgagtcttcagaagagaatgaacttttgaacgaacttggagaagtagataagaaaccaatgcaagaaagaatacatgaactaatcccttcctttacattagcttttgagaatagcgttccaaatctgttctcatccatttcaatttctaatgtcaaatgaggaaaagaaacattgctctaattagggcaatgtttcttttattagataagcagtatttaatcaactactttttcaattgttggcattatagcgattggtggtaaagagtaagtccaagcagcagcgtatacgtttaatttttcacctaatttgtagttttcaccattggatacaggtactcttaaaattttattttgggaaactagctcccaccaattattctgataataaagtgcttcttctttcgtaaaagtatcagcaacaattaagtaattatcgtctgctgaaataacatagcccgtgaaaggtatttgtattcgtacctgttcctccttaattggagaagtgttattggctgtatccgcagaagcaggtgttaagccaaaagtaaatccgcaccctaatgttaatgttgtaactactgttaataatttttgtttttttgaaaacataatagaaagcctccttaaattttattaccacaccaacacctttctattcatttagatataaagcctttctgcattcaaatatttaacaattttgtcataaataaaacaaaattgtatgtgatatgtattttttagagtgatttatgatataattcactaggtaaagtattttcgtggttcatctctatatagttttttaccctacttactctgtaaaatattattggtgaagagagaatgttttctctcttctttttttatttgacattaataatatcgttaataaagtatgtttaatattttttaggctattttgttgttggtaattagttttggtacgtataataaaatatggtttgattaagagatttagtcttgacgtacagaatttgcaaaatgttggtgttccgtctttatttacatcaaatgttaaatgtattctaattttaaatgaattcaacataatattttgtatctataatcccaaaggaaactttacatggaaatgaaatttttcctgcagaagcagcctgcatacaagaaattacccaagattccaattctaaaggcaagcggtatacttgaatattaccatcactgttttttacagttacaatcggtgtatttactctggttgtagcaaaatcgtccgttgttatcattcttactgcattattagtgtgaaaaccagtgtttataacttcataaatctgtccatctttctctttaataaccataggtatatttaaatagggatagtttttaatatcattatgaataattgctcctactgcattctttcttatttgaacctcttgcattcttttatgctcctttataatgatttaaacatgtttacgtaaatttattttattttacatctatatctaaagctattttgctcattaaagggttagggtcaattcctattgtgcattcgatctgtgtttttgcatatatttcacgtttaaatttcaacgcaaattgatagggatcgttagtaaataaatgaatgctatccgtaatatccatgaagaactcgtcgatggaatattggtgaaaatcctcaataggaacgtactgcaaagctaactttgttatgtaattagagcatttaatgtatgttcccataatcggatttataataagaatgtcttttcttcgaggaatctcgtataatctggccatcttctttactcccaattcttttaatgggggagtggcagctaatacgaaagaaccgtttctatttacatcaccgactactgccaattgtgtatacataggatctaaccccattttgatgcaacttatagaagcgtaaaagctacgtaaatcaacacataagatgattctattcggtaagatagaatagtcatacactgttattccttcctaaacaaaagaacgtttgttcttattatatacgagcttgtgttcttttataaagaggttttgttttaaaataattttttcagatattcttcttgtgggagcagcagttctaacaacaatcagtaatagggggcgtgacatatgtccatcaagctaaaattttaacatacccacaaaaagaaaatttttatctctctacaccaatttatgacaaatcatttttttcatttttaggataatgaatttcttaacttgatggcaatgacctaacattaaagtgtatgggtgatttctattaattaatatatcaaatttaataaatgtaaaattaaagcataggtgtatgataaacgtatgtaatatccttcattatgtcctaaatgtgccctggatttattagtatttttttgctaaaaccatactaaataaaggccgcaataaaaataaaggtaaaatgaacagaatatttaaaattatatatatcaacttatttaaaggttaatctaatgtaataccatgataccatggttttacattagatatagataattttggaaaaggggaagattctatgaatgttcaactagaaaatgaacaaataacaaaattattaaacgactggtatcaatccatgttaaaacaacaattagttaaagcaaaacaattaaaagagtatatagaaaatgaaattaacaatgtcaaggaaaatcaaaacgtactcttatattattctttattagattttagatacaaagcattaacagattggataagtattaacgaaagcagttttgatgaaatggataatttcacaactccagcagatgacttcctagcttattattatcacttctttaaagcattccattctactttaacatccaattacactgaagcaagtgaacactatgaaaaagctaaagaactattaatacacattcctgatccaatagaacatgctgaatttaattatcgaatggggtatttttattatcaaatctataaacaagtaatagctcttgattatataaaattagctaaagaagagtttttaaaacatgaaggttatgaaataaatgtagcactatgtgacaattttataggtctgtgttgtattgatttaaaacatttcgaattagctgaggagtcatttaataaggcactagacacattccaaaaaaataaccataaaaattctatccttatggtaagacataatttagcttggttatattcaaaacaaaatttatctaaactcgcgattcgtcatgtatctgaagtaacaaagaacaatccaaaccatttcaaagcatttttcgtagaagcatatgaatactataagataaatgaccataattacagcgatcaactaattcaaaaaggattaaaacttagtaacgattttaacaatcaagaattccaacatcgttttaaaattttaagagccctcaacaacaatgtccctacattaactttagaaatatttatttcagaaggtattacttatttcaaacaagaaaaactatgggaatgcgtaaaagaatatgctgatatcttagctctaaagttttatgaagaaaataaccataacaaagcaagtcaatatttttatatgagcaatacagctcaaaaaaatgaattagaaaaaggagcgttaaaataatgaaaaaaatctatctaactatacttggaatatctttaattagtatcctatcgttagggttaaacgactcttttaaaaatcaagctgtaaatataggagacggtggaggtgcaccagcaagaccagattatttattacaaacacacgctgacttataagaaaaaaacaccttcattcttgaaggtgtttttttataatctgatttttaaataaatgaaaaacggaatatatcaaagttctctaagttaacaacatattccaattattagaaaaatattaaaaattttaattttttgttctattatggaaatggtgaaaatgtaggggctttagacctaaattcaaaagatggaaaacttaatcagatgaaattattcactgatggaaaaagtgaatcaatcttaaaagaaaacaatgcaaaagcaggttactgggaagatgttcaacgttgtattaaaaacaactggaaaactatgcctcaatgggctaaatgggcttgcgaaggtgcatgtggtggttgtcttggatgtctagctggttacgcaattggttgcgctgctagtcaaatataaaaagaagggtgtgattcctcaaatggaaatgtctaaaggaatactgttttatagactaacattgattattgcttgtttggcagtagttgccttcacatatccatctgaattctctaaattcgcattaatcgcaggtattgttggtatttttatcattttagccaagaagactccttcctcaaggagcgtgaagggtcacagttcagtgagtaggtgggagatgaattgggttcgaacaagggatggcaggaagccatcttaattgttcgacatatagaaagtgttactccactacctatcgaatgtacgtttggtgtataatagtcatataccgaaatggaggtgaatcaaataatgatgaataaagcctataagtttcgtatctatccaaatcaggcacaagcaattctaatcaacaaaacgattgggtgttctcgctttgtattcaatcatttcctatccttatgggatcaagcatacaaagagacaggaaaaggcttgacctatggtacatgctctgccaaactacctgccatgaagaaagagcttgtttggctaaaagaagtggatagtattgcgattcagtcgtctgttcgcaaccttgcggatgcttatacacgctttttcaaaaaacaaaacagcgcaccgcgctttaaatctaagaagaacaacgtacaatcttataccacaaaacaaacaaatgaaaacattgccattatagggaacaaaataaagttaccgaaactaggccttgttcgatttgccaaaagtcgtgaagtagagggacgtattgtaaatgctacagttagacggaacccttctggtagatattttgtgtcaccatgactgctttctgtatcaatcacaactttgtcaccaacatcgactatataaggcggtgtattttgattatttaagttcactttccaaaatttcaaatcggaaactgtcatcgcttctactggcggaacatcttgccactgcatgatacttatctgtatttgagctgctttttccatatgtttattgtctttatcggtccatcttgcaaagcgttctgaatcatctttttctgttccaggaagaaattttgaaatataagcctcccaatcattaccggttctagcgatccacaacctaccataatactgattccatgtattcggataatcaccactctcataaattaaacctgtttttccaggcttattatcatatccaattaccatcgttccaaaattttgttcagcttgccaatagaggtcattcatggcaatttttgaaagaactttgctgttttcatcgagtatcgctatctcaactcgtcccatttcattgatctttttacttttacatgtaacgtgggcttgcataataaaatcttgtactggcccaccagggatactctttttaacagatgcgccatgccatccattacttgaaccatagtccgaacaatagaattggtaactatctgttttcatttcaccaactggattaccatcttccatagaactaaccttactccaccctacagttgtggacatttcatcccatataagacgttgatttctttctacaggcaattgctccatttttagtggcattccaatacgaaaataatctggttccttttcgtatttatcttcaaaccatacatctaaaaaagtatgtggctttttaatatcaatttcaataatcggattggaatgcacagagcctttgttttggacattggcaattaacccctggccgtcattttcaaaatcaaccgttttctcatttcctaacttataaggcattgggcaaacaaagttcaaaatacctttacctaacgtaacaaaatcctctgaatcaaaatcttcatcaataaccgctaagtatgtcctatcaggtgttacatcaaagactaattcaacaggtttttccgtaattaaccactctgctatttcttcttttactgtttctaagtctgatccatcaggaacgataattccgactggaacaggtaaaactcgcatttcagtttctgtcgttaataatcttgcacctggataacctggaacacttaaaaagttccgttttaatggcgcccacgctggttttttccaacctttttcgatttgaataaaatccttgcgtatattgttaaatgtaaaagagctcacgttgccacctcatttcttttcaaattaaaagagactcaaacttaaaagtctgaatccctctgtgtttctcgttcttgatattcggttgtatagcgatatgtaccacgcgctacatctcgtccctctaaaacaacaggaacctccacaacgaaatctccaccaagcattggaatgactccaccaccagatgatcccgaagaataatgaatcacttgattcgcaacactagctgccatcgcttgtctactatttgacatatttccatacacaccactcataacactctttaaacctgataattgattcatggaattagccatcatccgactcatgtcacccattagttgattcatagttccagtgatacccagtgatctttcttttgaagataacggtgtaaccgtgatggaattccctcttttggtaaacagttcagggcctttttctccagtaataaatgagccatctcctacaggttttccacctttcgcaagcattggtacatgtggaatagtcggcgcgctaactcctggtatattgtttagtaattctgctggtgtattaaagccatctataaatttatttatgatacgaataattccattgatagctgtacgaataccacttttaataccatcccatacacctaatactgctgatttcatgccttcaaatgctccactaacggcatctgttacccaacgaacaggcgtcataatggcttcttttaatccattccagacagaagatgcggttgacttgataccttcccaaatgtttgaaagtgtagatttaataccattccaaatactactgcttgtgctactaatcatgttccaaaccgttgagatggcttctttgatgctattgaatacagaacttgctgtagaaacaattgcgttccataagctagatagatagcttttaatcgtattccatactgcacttgttgtggagctaatcgtattccatgtattcacaatccaatcttttattgaggtgaatattggtgttacaaaagctactaacccgttccagcacgattgtaagaaattcttaacagcattccatacagacattgttgctgaactgattgcatcccaaacggttgtaactgtatttttaatccactcaaatacagttgtcgcaattgaaacgattccattccaacaagtcgttaagaaacttgtaagtgcatcccacactgctgtagctttttctttaatagattcccataccgaagctaaaaactctcgtatagactcaaaaattggagtggcgaaatataaaatagccgtccaaattgcttgtaagtattgtgtaataaaactccatacagtttgaatcactgtggaaatgccgttccaaatcatagagaagaaatcagcaattccttgtaaaataggagttagaaaggcaactagtccattccaagtattaatgaaaaactcactaatcgctgtccacacttcagaagtagtttgactgatgccattccaaacttctgataatgtttcaactactccatcccaaattccagtcaaatattccacaatagaattccatatttctgtagtcgtttcaacaatagaattccatatttcagataaagactcaactatcccattccatacctctattaagtattctttaattgaattccaaacttccgatgttgattcactaatgctattccacgtttcgctggcccattgtacaatcccatcccatatgcttactaaaaattctccaattgcattccaagcatcaatggtccattgtttgatatcatcccaatttttataaattgcaacacctagagcgacaacaagtgctactattatcggaataatagcaaccaaccctgtcatcgcccatcctatacttgttataacagcaactattggtgctaaagccatgaatgctcctgcaattacaccaatagcaacagcaatcgctgttaacgttgctgctaattcaggattattagaaatccattcagcgaatttagaaacaagatctgctataacttcaagaacaggctgaagagcaacctgtaaatcttgcattgcttgttgaaatttaaccgctggagatgcatctattttagaagtagcaccctgtaagtcttctactccttttttcaaatcgacttgtttaccttccgctttcaaaatggtgtcgatgattttcttcccttggtcttcccaaagagtaccgaacatcttcgtgccaagtgcatttctgtctgttgcattttcaacaccagctaaagccttcgttgcttcaagcatagccttttgtccattttcaccaccgccagcaattgcctgaccccatttttcaaactgatccgccgagatttttgttttatctaaaacctcttgcatagatttatctacacctgcaccaaattcggccattttaatacgaccttcttttacacccgatatgttcaacaggattcgcaacatcctgccagttctcttatgaacttctgtacatcactatacagaccagactatatcatcatcttttatataagatgctccccatttcgaatgtcatcagcttacaccctacgcttttcagctagtcgttgcacgttcctttgttaaaggcttcgctcagtattgtctcttttgagagttccactgaattaaaggagttttctatgaatgtcgccactcatagggacaatcatttatccaataggttatcgatattccaacttttagtatctactcctgctgacatgattccttggacttctttagccgaaaatccagcttgaatcatttgatctccatattcagcaataatatctaattgttctggtggaaatcctgtttttaataatgtattcactagccccaatgcttcctcgttcgtaatacctaacgttgcaccaatctcattggtttcttgtataagttcattaaaatcaattccagcgtaggatgctgcaatagtcgctgcccctttaaccacagcggcatttgtttcatcagaagcatctttatttaatgcccattgtctgcgaacaccttctaatgcttcttcagcgtcaataccataagtactaacgcccctaatcgcttcttccactgattttttcgaagactctggaacatcgaaagtgatatcaatcttagttttcaattttgacatatccattgctttttcaactgctgttgcgattccgccaccagctgccattccaccaatgacgttttcgagtcctactttgagtccttcaaacttcttctctgttctttcggcttcttgttgcaaatcccttaactcatttcgaacttgttgaattgaatttccagcatccacagatcgaagagcacgttgtaatttttcaatatcggcttctgttcctaatgcttctcgtccaataatcccaatcgcttgttctaactgtcgacttgtagccgatccacttttaattgcatttacaagacgattacctaatgcccctgcaaaatcatccacgcttttgcctgtagcgctaaacaacgtttctaattgtcttgttgaacttgccacattttcttgttcagctttcatattaccaagcttatttttcaaaccatcaagtgacccttgtgtaaattcaatttcacgtctaaacgcacgatattgttcttccgatatctttccgttttggaattgcgcttgaacctgctgctccgcttcttttaatttatcgagcttttgtgtagtgttttcaatttgttgtgtaagcaactgttgtttttgggctaatgcttccacattaccaggattaaattttaaaaggcgctctacctctttcagttcggttgctaagctatcactctgtttatttacatcttttaaagcgttttgtaacggctgcgtattcccaccaatttcaatcgtaatccctttgatttttcctccagccattctttcacccctttcttagaatgaatcaaagtctttttggtttgcttttctgactttttctttgtctggattctccatttcagcgaattcagcaatgtaatcaaagcaatcaccaatcgtcatgacgtccagatcccaatgcgttaatttcgctttataacaaagagcaaggaacgtatcagtggttaattcttcatcactgaacgtcccttgctctccattacttttctttattttttttttgcgcccatcgtactttgaatcatatccataatttctggaataatctctgagatagggaattcatcaaaaccgtctaaccatgtaattggatcatcaatttctggatttgctgttttcgcatataaccaaactaaatcatatacaacttcaaaatctagcttacttaaatccgcattagctaaatcaatagtggctagtgaaccctcttgaggatttgaaggagacaaaatccctaacttaaacatatcagcaaataaatcacgtctgaattgcgctttatatcgtttaacagtagctgctgtactttttaatcggacttgttttccgtctattgtaattgtcttttccatttactattacgctccttttggtgctgctggtgtttttacatatacttttttgtaccagtcgttataaattgcttgtgttgttttagcagtcgttttcgttttaaccattggtcttccaccaggtactaaaacaattgggctagaaacaaacttcagttcatttgtatttggttcagccgaacttgtttttgttttagatgcaagtgttggacgacttgctgaacagttatacataacatgtcgtgttgcattgacatcaccatcaaactcaaataataaagcgaatggttttccttttgcatcagccaattcatttaatacaccatccgtttcgtctaattcttcaccgagtgcatcaatagcaaatttttctgggatagtagcaatacttaatgttccatcgtaaccctgattattacttgccgcgtaataaagcatgtcatctgcatagaattcaattaaatcaccgcgtggctcaaatgttagttcaactccaccaggtaatggaattggtgtcccaaatgtaactaagaaatctttactatcaaatggcacgtaatgtacatttttcaaaccgaatgttaccttgttttcattcatttacaacaacctcgtttcatatgttttttgaaataatttctcagattcaataaaaatcccatacgagtcataaggtatttcatgatcgtctaggaccttttccaacttggcttctgcaaccaagtccttttttgtggtataaagttcgatatttacatcatttatcttgtgatagaccttattatcagccattaaatttgctgaaccatccacaagaaaacagatataaggcggctccggaactggattaccaggtgttgctgtgaaatgcgaataagccacaggataacctgtagcttcaagaatttttctaaattctcctaatgttactgtcatgattcaattgccctttcaatacgttttggcaattcatcaattacatactcttcaactggacgaatatgtactttctctggtactcgtccaccagcagctttcgcatgaccattttctaaaagatgcgtcaattgcccttttgtattatggataacaacagctttatcaacttttttctttcgccagccttttcgataaccacctgtttttttaggactattttgtcttaacttatctacagcgatatcagctacatcttcttgtgcatttgttaattcttcttccacaacatttgcatatctttgtaattctctagcaagctctcccgcaaaatcgttcatattaaacatgctcctttgcgataatagtcaatgtttgatacatttcatcatcattcattggcggttcgataatatcaaagatacggcctttcatattgattcgcatttcttctgtaatatcagaagtataaggaatcacaaaacgataaacccgtgtagcttgtgaagctgaagcttcaatgtactcggaacctttcatcgtttttatcattgaccaggctttctttaattcttgccaagatgtttcgattacttgatttaattcatcttttattactacaggttgctcaatactaattcgattcctgaaatcacctgtattcagcggttttttatactgaaaaggacgcatattaatcaccgtccaacttaattgcttctaaagcttttccaatgcttaaactattaatctggcttaaaaaattcttatcaaaatactctaaggcatcgttataaacataacgagagcgttcaaagactaattccttgaacacctcatcaatattaagatcataattaccacaaaccctagttaaatctttattggatgcaaataggatgcgtcttaggtttgcatcttcatcatcacctaatcgcatcctatctttgaattgctgtaatatttcatttgaaattaccttatccattcacatcattccttatttagttgctggtggagttggtggtgtaaaagaaattttcaaatcataaacaagagctgctttattatcttttggtttaccattagcaaactgtttgattgtataaagcgtagcatcttcaatcgctaatgtttggtcaaactttttaagtttgtatccacctgctattgctgcgatatattgtcctttcacaaagaataatgcttttccaactggaacttcttcagattcaacagtttgaatgttataaggtaatgccattacccattggccattagccgtttgaattgtgttacgtgcttgtacaccaattgcatctacaggattgacaaccatcacaattttatttaacactttacgggattttcctttcccatcaacagataaagcttttactacttcataaagctcaccagcaattacttcaccattttcagaaggagcaaatgttagtgtaccggatgattttttatcagtaaccgcacctgtagttgcatttacatctttcattaaacctacaggttgatgcgctactgatccaccaccatttacaaagccaaactctaaaccaacagaataactttctactaataatgttcgaacataacgctctacccatactggccctaattcgagcatgtcatttggaatagcactaaatgcagttaatttaagttgtccaatttgttcttctctaaaggctgcatttatttgccctctaatatcaccgaataattctccccatgcatacgcttttgttgcgtcagaataaataaacttcgttactgctcctaaatcttgcattccaattgcttcaagtaatggatgttcagttactaaatcttcaaatacacgttcttgtgtagtataaggaagaattgaatcatccttaaatcccccatcttgtacaactgcattaaagaatttacgttcttcagacgttaaaacgttttgtccacgtgacgtcaaaatttgagcgtcttgcgcttcgatacgtgcttgtgctgaaatcttttctgataaatccgttacaagagtatcaaacatatcatcaaatgcagcagataaatcctccatttttgtatcttccgctttcaccagattcatatatgcttgttttttcgcttcaaagttttccattgtacctttaattttcataaccataattgtttcctcctaatttttgagaattaaaaaaaccttttccgtttttgattaccctccacttgtaaatgtggtggttctggattaggtttatttgataaattcatattttgttgtaagttattcgttaccctattaataatctgttccaactgttcatcagtaataccactatcactttctcgattatcaaattctactttgtcagcaaaaccttcttgtactgcttgttcagcagtaaaccacgtttcagcttctaataaatctgtaatctcttcacgacttttacctgttttttgctgataaattgaaactatcgactcatcatatgcttcgagtgcattcaatgttttttgaatatcctgcttgtttccataagctattgttgacgcttcatgaatcatcattcgtgagcctgtgcgcataacaatctcgtcagcagccattgcaataatcgatgcagcagaagctgctagtgatgtaacttccacaatgacttttttatctaagtcctttaagtaattataaatctcaacaccttgatcggcatcgccaccaccactgtttagtttaattttaactgtagatgctctaacttctttcaaagcgcttcttacactttcagcactaatagcatcgtaccaccaactgctactaccgatataacctgataacaccatttcgtgctcatcattttctggattaactgcattagaaaactgataaggaatatgttgtattttatttttcattcttatcacctccttcaattgaatttgcagattgataattcttcgtaattacaaattcgtctagttctggattattagagcgttcagcaccaaacaacttcctcacctcatttctagtgaatgcaccacttgctactaatttatcaacagcctcagcatgatctataatatctttctctttcacaccagttacttcaattttttctcctaataggaagttctttttttcaattaatttcgcatttaattcatcttcaatctttttaattagaggactaatacagaattttatataggctttaattgatgtttcgtagtctcccatatcaccacgaactaatgccgtaggaatacctaaaatattagccacatgatctattaaatctttttttaatttagatagttcctctacagaccttccattatttgaaccatcggcaatttccgtataattaaaaccctttatctttggaacaattgcaaaagcatttttacgaaacgccccaaacaatttatccataaagctttgtaatttagtaaggttttccccttccaaattctgtgcagattccatctcagcggttgcacgtatttgattagaaaacatatttgtctcaatcatacgactaaacagttgagtgtaatctttaaatattccactcatgaattttgtcaattcttcattgttataagtaatgtagataacctcgtccatttgaaatgacctttgaaacgtgtaatcctttacggttacatttttaaatacatcagggtatactgcatattcaacacggtcaaaatgatcagcaatgagtaaatcattttgatctgtaagaattgccaacacttcattatcaagtatcaatttgtacacaaaatcttgccaaaagtcagcggcactttgatctgtattcggtctaatattcaataagtaatgccagtcattatattgacgtgtatcctttttcatcatccgaaattcagacagcgaaacggttcgagcaataaaattaatacaagtttctaaagctactttttttaaatacgctctttgattcgtttcaataccaaagaaatcaaaatcatttagcatcgtattaatctctttatttttaccaagtacatccgacaaccaactcatatttcctcctcacccctttcttaaaagtttaatgcattcagcaagtctagcgctgcgccaacatctgtttctcttacctcatccgctcgatacatagcatgtacaaacgcctggaatccatctgtttttctacgaactggttctttcttctcatacattttatttccatcttttttaataacaacgagtacattattggtataccaacgcattaacggattatcaccaaatacaatttgacgatgtgcgaatgcaacttcaattctaggagcaagcaaaccatgaatagctctcggatttctaattacttcaacttcaaatccagcgtcctcaaaaagtgttcttaataaatctgcacgataattatccattatgatttttttgatatcataatagtttcgcatttcaacaaaccaagcaacgatggtatttggatcaattgtttcgccttccacaactgtcagaagatcttgctcttcccattctcgaattggtgcaaacttcttcttaccagctatttcagcatcctgttttttcgaataactataatatttatcaacgaattcctttctagcatacgaatgagatttccataaataatcacccttacttctaaaaagtaatccacatgatgcgaaatcacgaatacttgcataatcaagcgcaccaatacattcatgacctcgtaaatctggcaattcacgattagttgctgcaatctcttcccattttgcaactgacctttctaaatctgtaacaggtaaattcattcgttttgtcatgaactcttctctattacttgggtcatcttctaaatcttcatattcttcttttatagtttcaagtaacccctcagcatattcgctcaatggtttagataacataggattagcaagttcccaattatcaatatcatccacttcagtttcatcattcaatttacagataaaaggaaagacagcattcggacgtgcttcaccgttcaataccttcattgccttttctttttgcttatctaagaaaccgtcacgaacatatccatctgtaccaatataaaattcacgtgggtttttctttttccctaaaccactgatatgaacgcggacatctttattactttcgtattgatgtatttcatcaaatacaaccgcaccatcacgcaaaccatcttttgtatcaccgtttgaagtcctaaacttcagtacactttcagtagcctttgaaaccgtttgagttaacgtcgttttaaaggctcttttcaagacctcattcttcttcacacatttatgaacttcatcagggcttgttttcgcctgttcttcactattcgcaacaactgaaatgttatactctggaatgccatgtaattcactaattaaaaaatgaataataacagaaatcagaccatttttaccgccaccacgccctaacatccataggaatttacgataaaatacacgtccatttttcttataaaacaaaaagacgaatgctattaagaatttttgaaatggttgcatcggaaaataccacttctcaccgaagttaatacaatcctcaatcatttcatcatcaaaatacaaatcgtctctatttaaaacgtatttttctagatatccaattaacagttctctttctttattgaacttcactttcccacttcgataaagttcaatatattcttctacatatttttgcttaatcatgtaagatcacttttgttatatcctgtatcagggttagtatttttaacaacaaactttatatctctccctaacgcaattaaagaactgttaattttattcctctcacttataagagggtgggccttaacgaaaacttgagttccatttttgattgttacggattccccttctttagttatcgttttattaatttttcgaaatgctttaactagatcaatatagcgttccaccttttcaacttcaactaaatctgtcgtatcaacactattcattaactgttcctttaaccttacaatactaacagccatctacccacccccccttacgcgcgtattttcgaaaaaaacctgtcagttaaccccctcctccggtgccccttagacgaaatattgatgaaatattttaagggggggtgttattaccgaatcatttttaccacttttcatcgttttcccatttgttgattttctttttgaatgttctaccgtgttctttattgtggcaatccacacagattgtttctaaattatctatttctaatgcaagtgctggatgatgttcaagctcttttatatgatggacaacgagttgaatcttcttacgttttgcactctcgctgtattcattcgtgtctgtttgtactcggccattacgtttacattcctggcactcatagttgtcacgcttctttacttgttctcgtatactcttccactcaccactgtcatagaacttacgcttctgctgtttggttttgtattccttcattacacattacaccaccatctgcacaccacttacagcgtaatccatcctttgattttgctattcgttcactatactgttccgtatatccacatgctttacatctaaactgtacaatcttttgtacccttttacttcttaatagatcgtctattagtttgttcattaaacttatatcggcttctctctttgctgctggtgttagattgttatgaaatccttctattacttcaattaagattggcaacttctctacatctacatactcttcaatatcatctaccccaaccgaatgtataagcgtactaatcgcaattgctttctcaagtttagttaattgcatctatcctcaccccttacacttaaatcctttctccgtctgtctctttctagtaattcttttattgatgtttgttccaggtattccacggaataaaacataggtttcccaccatacagcttgtaatacttaacatctattccagcttttttatgcgctttttcaagaggtttaaggtatttgatatatgctttcttatcaatgagcataagaccaagcgcagcaatcttaccatttaaaacgctgtccaattatcctcaccccttatcttctaataaactagcaatcattttatttagtacacttaatgttgcttctccacactctttctctgttgcactgtttactatcggtccgaattcttcttctaatagttgtaagtcgacatgtttagcaagcacatcctcacctacagctataagaattgaactaacaatacctatcttctcaagtttagttaattgcatataccctcactccttatttatcaaatgcaacacgtttgcgcttatctttccttaacaacaaatataatttatatctgaatgtttgaattactatcattaatacgtttgacaatttctgaagccatcgtcttaccatttaaaacgatgggacattctactgtaatatctttcagtgcgctctttcccttaaacctactcataaccttttccaacttctccaatgcagccgtacattcattagcagcttccgttacttctttaattccttttaatgcttcagttgtttcaacatttaattcaattgttaatccttgaatattcttttttgcatcatgtgatttttgtgtatatttgttcattacccacacatctacaaaagcaccattacattttggacaaactgttacttcttgatattcttctttagatggatgataaactttatccatatgaccacatactaaacatttagccttattaaaatactttttcccttcattcaccttactcactccttatctctatctatatactcacgcttttcagaatcccaaacctcacaatagtcgaaacgttctttttcttcttcataccatttgattgcttcgtgcttagaattagttgttgtatgaatatcagcaaatccaccgcaaggataatactgatcgaatcccaaacaccaatatctatcatttaaattgatttcgtccatccttcattctccttcaatcaatttcttttacttcttctatcgcatatactatagcatccaaaatattttccccatctacctttttatttagagatttttgtaaattatcaaccgtagcttttaagccctctacagtttgagataatccttctaccgtttcctttaactcctgattatcggtaaataattgattaatcttctttttcaatatgatgttttgtaataacgcatccttcattacttacacgcaccacctatataatttttacataataaaaagcacccaaatcgggtgctcgatatactgatattcattaagaaaatatataaaaaaacagagaaattcacttccacctcttgatacgcatcgcgatgcgtgttataataaatatagaaagttgaaaggaggtaataacgatttctagtagggaagtaattaagaggttaaaaaaagaaggatggcttatagcgaacattgaaggcagccaccatcagttcaaacatccttctaaggttggcaaagtaaccgtgaaacatccgtgcaaggatattcccaaaggtacacttcgctcaatctataagcaagcgtgttggttataaaccgccccttgctttccctaattatacaagaaatcgttataaaaacaaattatgaaaaaatttcaattaatggaaaaccgtagagtttctatccttaagttgatgggcatggggtttccacagatgaatagtttttatagtcaagaagagttgagcgaaattggctttctatctgtcggggaaaatgtattaataagtaaaaaaaccagcatatataatccaggtgctatatctgttggaaataatgtaagaatcgatgacttttgcattttaagtggtaaaattacaattggaagttattcgcatatagcggcatatacagcgttatttggaggagaaatggggattgaaatgcatgattttgcaaatatttcatcaaaaacaattgtatatgcagcaattgatgattttagcggaaatacattaatgggaccgactattccacatcaatataaaaatgtgaaagctggaaaagttgttttaaaaaagcatgccattgttggtgcgcattctattatctttccaaatgtagtaataggagaaggagcggcagttggcgcgatgagtatggtaaaagaaagtttagatgattggtatatatatgttggggtgcccgtaagaaaaataaaagctcgtaaaaaaaatatagtagaattagaaaatgaatttttaaaaaatattaattcctgagtgtttaaaagattttgttgcagcatttctcaaaaaaataaaaaaagacatgtatgaggggatattatgtgattactgtattatttaaggggctatctttatagttgtctttgtgtagtaaagaggggtgttgtcacacattgctatcccaaagtaaaaaacgttattctttctaaataagctaaataggaaggaataacgttttttttatgaatttctcgattgaatcactttatatcattcaagtaacaaacaattataaaaaattgtttgttacttgaatttatttcgatttgtatagagttaaatttcagcctctagtgttgcgatatatataatttaagcttctattttttagttgcagataataccttataacgatgtcttaaataacaaaaactataagaagtaaattcaatacacacacacacacacatatatatatatatatagaaaaactaatgtaatttatgttaaaagaagagtagtaactttaaatatggaaaatgaaaaaaatttataggaggctgccatttcatacagtttggcggcgtaacgcaaatatttcggctaaattaatgaataaattatcggacaaaaataagcgctctaactttgaatagaacgccattttaccgtattacctggccccgaaaaggctcgaactcaatacctccaccctgtgaaggtggaggtttattttattacttttcttcctgcattataaaattccaaaaacgttttaattcttcacgcttttgggatggagcaagttttatatcatttaaccattgatctagttctttattgtttctgtccgctttaacattagaatctcgccctagaaggaaatcagtagatacattaaagtaatctgctatacgtatcaaggtattgtaatcaggttgacgttcattgcgttcatacataccaattgtactttcacttagtttaagcgattgggcaagttctttttgtgtaatgcctttttgttttcttaaatcacgaattatatttccaaacgttttcattctatcacctgataatatattaacacattatgtgttaaataattaaaatttttaaaagttgataattataatctattgacaacacaaattgtgcggtttatattttaattaacaacacgaaatgtggttttaggggtgaggatgtatgaattatgaaagagtagctgaaaatctaattaacttaagaaatggaagatccagagaagaggtggcaaaagcagtgggaatcagtattagtacattacagatgtatgaaaatggacagagaatcccacgagataatataaaaataaaattagctaatttctatggtgttacagtccaaacaattttttttgattcggaacaacacgaagtgtgttgaataatgttagatttttaagataatgtagtgattttttagaaatgtaagcttagaaaatgtattaggcaattttacataaaattataatgtttttatcattatatataaattatagggggtatttgcatgaacatgaaaacatttgaaatacgtgaaaaacgattagcagaactactaggtgcaaaagtactatgggaatttataagtgccgtaacagaagaaattgaaaagcaggagttagagtctacacctggattattagaagatctattcatacatgtgaaagaaacgattcaaattcaaaatatgaatcaacgcagaacaaaagcccctgtaaaaacagaggctgatggtataaataaagatacattatttatggaagcatatgtagaattaattaatcataagtttgttatttctgaattagctgtagagctttcatctgttctaaaagaattaaattgttttgttcaatcatctttgccactgcttcaaagtgagcttgattctcaagaacctcaatctgcttctctttagggagtgattgaagtatttcttttatttctttacactcgtatatgttattctccgagtcttcaattaatttattgcgtcgattggtgtattcaagtgcacctaaagttgctaatgcgcgaggatctaatcctagaatttccatgtattcctctcctttcctctacaataattcgataggggaaaggagattcctttaatgatttggtaaaattgtgaaaggtgacacttatgttaacttgaatatcttttactaacctattctgtataaaaaatagctgcactcaagtacagctagtcttcttcacaaacttagatggcctcgatgacaaattgggattgaggtatatatagtaattgggctgctaaggaagttgttgtgttagcaaatggatatgcttccttataaagaaatttactatacactatttcattcatttcaaaggtcgtatacagttttttaaggattttttgagaaattttatttgtgcaagcagcaataaaatcaaaatcttttttacttatctcttgaatggcatgtgaaagaagggtagtgactataccacttcccatccaatctggatgacaagcgcccatatctagatagaccaatttttctttatctaaatgagaaaactcaatagattctgtctctaatgtatctaaaagttgaaaaataggttccatttgcgggcatagttcaatcgctttctctgtatctattagtggctgggttactttttttgttaaaagaactccaacaatttgaaaattttctattgctacaaatgacatagcttgagatacagcttgtttcatcatttcttcgcacattttgtgaaaaggggcaaaaggaatttgtaaactgcttacaagaggttcattattcacaaaagaatgtgcaagtaaatgtgctgcatctttcacgtggtgtgtatcaagtagctctatattcatatgtttttcctctttcctgatatagtgaatagtaattaaaaggattaaaaattttatttcatttagttaagtttaactattaaagcgctaacaaatatggttatgatacatatgaatgaatctgtttagtggcaatcgaaatatgttcataaagaaattctacgatctcatctatacattcaacagttgtatatggagagatagaaaagaattataatgtagaaatcggatttctatcataactgtttattacatctactacacaagaacgagttgtatcaccaaaaaatacttgatcgcgattttttcctaggtaattaaatagttctatatttaatcggtttgtatcctcaatttcttcctttgttgcaaggcctattcgttctttttcccaattttcttggccatctccattcatatagaaacgaaaagttgtaattggtccatatgtaaaatcatttgtgattgcgacttgagggagggccttgcgcaacttctctctaaataatagatttacacgaatataatttgctaatattttttgatatccttcaattccaaaggctaatagattgatatacattggaatagcactaccagatcgtgaacattctaaggtatagcctgtatgataacttccatatgacctattaccaagataaggtgtgtcatcttgttcaatgtccatcagttgtaaatcagtatgattttttacgattaaaatacttgaagcataaggtgtttgtcctaatttatgaaaatcaaaacatacactatcagcaagtgccatgtattgcattttatcttgtacgtatagtaaagcattttttaagttaggttcaaatgaaagtggattttcttcgaaattataattattaaagaaactatagaatccacccattgcagaatccgcatggatataaataggttttaatttatattttttttgtattgcttcagcgctctctttaattttttttatatcatcaatggtaaaagtatctgttgaccccatagtagctagaatataaaggggaataccaccattattaataacttgtatcatctttgcctctaaatcatctatatccatagaatttgaataaggatccgttttcactttaattaagtgatttgatccaatgccagttgcttcagctgattttaataaactatagtgtgcattttcagaagcaaagcaatatacattttgtggagcaccatattcttttgctaatgggaattgtttagaaattgctaagcgtaagctcgaaaatacacaaccttgtccaccccatgttgtataaccgccgctattatgcggattataaccaatcagttttgaaagcatggatacaacttttacttctgcttctgctgcccctgggccatagacatcccaaacaccattaccatttaaaagagccatggttagttgacccaataatgacggaatacttggtagtggtacggcgttcgataagtagtatttatttggataaggatggccattcataaattggtttagctcttctataacctcagacatagtgatgccagctagtggaatatgactttggtgaattaagccattgtagtatccttctgatttttcctcacatttacctaaagtagctcgctcttcattttttaatcggtcaagatttttaattattttctgcatagattctaataaaagttgttgtttttcttcatttccgtcaacgctcggaaataattttaaaatatcttgcatgcagtcacttctccttgtgaaaaactggatttttattttacttggttaaacataagagtgtaataatttgtaatttcccttttgaatacttagaaatgaggagctatttagaaaaaaatgtaattccatagaagattatatgaattatagaatttaaagtaaagaaaaattttttgatttatttcaaaaaaattaattgtgagataatgaagcttctaaaaatatttctgaattaattgtttatttggtttgcatgatgccctagcatgtatttaactaatgtagtagatattttaatataatgtaaaacgtattataaggtagttgaataaaagggttcaactaccttataaactgtagaaattgttggggaaagataaaaaatagggtggaagtgctaaagatatgttctagttgggaagaagtagtagtatggatttggtagaaaaatcagcataatttttttatggaataataattattcgatcaaagttttttaatgaattcaatttcattgtctaataataatggacgagttaagtgtgaagagttttcttcaacctgagtagaattttttgcaccaggaatagcaactgaaactgctgggtgacttaaaacataacgtaaagcaacttgcgctaaacttcgatttgagcgtacaagtgaacgtaatttctctactgtgtgtaagctatctttaaaccatttttcttttggccaatcttttcttaaatcatcgtctggaaattgagtttcatgattaaatttcccagttaaaattcccatcttaagtggacctcttatcacagcacctaaattatgtttttcaatataaggaaggatgtctttttcaggttctttattcaaaatactataatcgaattgtacgacatctaaatcattagcctgattaaaatgttttatataatctaaatcattagtagaaacaccaacagctcttactttgccagagttttttaaggtttggaaagcttgtagaaaggcttctgtttcttcaggtttatcccaccaaatatgacaaaagtaaacatctatataatccgttttaagccgcagtaaactagcctcaaacgcatcaatgatcttttgaggatctccataaacggctggttgattggggtcataatgatgaccaattaaaccaccttttgtagaaaggattatatcttgcctgcgattatttatagcttttgcaacaagtgtttcactatgacctagtccataaacgtcagcagtgtcaataaaattgacccctagatcaattgctttctcaattgcatcaagtgattcattatcttttactgctccccattcatctccaccaattgcccaagaaccgaatcctatttctgaaactattaaccccgtgttacctaataatctatattccattatgtacggactcctcctttgcagcttatgttataagaagtatatatagtgaccagttggaatattcttgaatttattttcggagtataaattagactatttcctttaataaaatatgtaagattgctgtataaaaagaaattagaattattagtgaaatggttttttatgcttaaattgaataaaagtatgaattgatacagtataaatatgagttttattcataattttaataactatgcaataagcgaaataaatgttgaatttagtcggaaaatatagatttacaaattgcagaatgtgtacatatagttgtaactgtaaatattatccgtttttaaatatttataaaaggagaaattcatatgaaagaaatacaaaagaaatatgaaattgtagaagaattggatgtaacagtaggccaagaagcattatggatagctcatcaaatggaaatagaaaaaggaatgaacaatgaaccgattataataaagttaaaaggaaatcttcaaatagaggttttaaagaaaacgcttactacaatagtacaatcacatccggcgctacgtacaatatttaagaagagggatgaaaagataaagcaattaattcaaaggaatgtagaatttgatataccaattaaggacttaactgcttttaaaaacacagaacaaaaatctattttaaaaaatttcttagaatctatagttaatgagaaatttagtttagaagaggggcctttgtttaaattccacatcattaaattcagtgaagatacatttattttacatttaatgtttcatcacattatttacgatggatggagtttaggagttttcatccgacaattatccaatacttatggtgaattacttcaagggaagtcgaatgtagaatttgaatctccttataagaacctcgtagagtatgaggtgggttttattgatagtgcaatatataaagaaggatcatcgtattggaaagattatttacaaggtgaattaactcctacagagtttcctattgattttaataaaataaatgaaaagagatatacagataaaaatataagcaagaatattaattcggatctattttatcaaatacaatgttttgctaaaaaaaataatataagtatttatcgagtaatgttaagtacttattgtacattacttcatcaaatgacaaatgctgaagagataattgttggtattccaattaatactagaccacatacagaagaacgagatacttttggctactttgttaatacaatacctatacgtataacaatagaaaagggagaaacatttaagggaatacttaataaagtgaataaatctattcatctagctattacgtataaacataatccatactcacatatagtaaaagatttaaatctaaatacaaatacaaatcataatatggtatattccacagcatttaatacgatgaagataccggaattaaaaattcctgatattgagtcaacagttttaacagattgtaaaagagtaaatccttttaatatgacttggagaataatgcgatatgaaggggaaacagagaataaaattgaggttgactttaactcagcattatataaaccagagagtattagtgatttagtcgaaagatatatatatttgttacaaaaactaatgaagaatgtgaacgaacctatccattcattggatttacttgtagagaaagattatcgtctatacaaagaaatgaactcaaatgctcttacatatcctcattcaaaaacactagatcaattaatcgatctacaatcattaaaatcaccaaatcaaatagcgatttcaatgggggataaatccattacctattatgaattacagcaaaggtcaaatcaaatagcgaattatttacgtgaaaatgatttgaaaaagggacaacgtgtaagtattacaatggagagagagattgataccattgtatggattctaggcatcttaaaatcaggtggagtttatgtaccaattgatccaaagtttcctgaaaaaagaatagaatacatcttaaaagatagcgaaagtcaaatgattattacgaagaaagaatacaggggattggttgataggtttgcgattcatacaatttatctagaagattttcattacgctaattctatagaaaatattgcgtctacacataccatagaagatgcagcttatattatctacacgtcaggttcaacaggtttgccaaaaggagtcgttgtaccacataaaggtgtagttaatttatcatattcagtaatcaatacatttcatttaggaaaagaagatgtgtttttacaatttgcaacgatcatttttgacgcctccattatggaaatatttccgattttgctatgtggagggagaatgcatttaatttctgaaatcgaaaaacgttcagcagaggaatttataaatgtaattcaaaagaatggtattacaaatgtggttttaccaactgcgttttttaaattaatagctgatatgccaaaagaaatgttacttaaattaaattctgtaaaacgtgtatttgtaggaggggaaactttacctgctgaatcagttcgtaaatggcaaagtaaattagggttaaagattccagttcttaatgcatatggtcctactgaaactactgtatgtgcaaccatgtatgaagtaaatggtgagatacaaaaagaaatctctaatatcccaataggtaaaccaattgctaataatgaagttttcgtggttagtccgttcaatacattatgtccgtcaggtgtagtaggtgagttatttattggcggtgatggagttgccaacggatatttaaatcaaaaggaaaaaacaaaagaggcgtttatctctttcaataaatcctataatcatgataaaaagatgtattgtactggagatttagtacgtcttttaccgaatggaaatttagaatttatcggaaggaaagataatcaagtaaaaatacgtgggtatcgaattgaactggatgaaattgaaggaacattatttaaacatccagaagtgagagatgctgtagtattcacgtatcaaaacgacaaaatcgttagcttttatttatcaaaagacaatacagaactaaaacaagaggcattaaaaacattcttaagtgaaagtttaccagattttatgatgccaaattatgtatttcaccttgaaagttttcctgtatcaccaagcgggaaactagatagaaaaaaattagaattacaaatcccatctttactttcaaacatgcagaagcaatatgttccaccgataagtgaaacagaaaaaagattggcaaaaacatgggcagaaattttaaatttagggaaatatagaatcggcagagatgatgacttttttaaacttgggggacattcattaattgctgtgcaagtgttaaatcaaattcaaaaagagtttcatctaaaaattgaaattagagatatttttgagtatacaacgattgctagtctgtctgcttacatcgataaattaatggcagtaaatcatgatagggaagaacaggagatgcaagtattaaaagttgcagataaggaaagttatcagttatcaagtgctcaaaagagaatctggtttttaaataagtataacgccattaatagagtatatgatacaccactacacatatatattgaaccgagcttgaaaaaagatatcttacaagacaccataagatttttagttgaacgacacgagatgctacgaacagtgtttattgaaagaaatggggagcctagacaagtcattttaaactcaatagcgattgatttgattcacgatgagattgaacacatgactaaaaaagaacaacaagaatatatacgcacaacaataaatcaaacggatcatacaccatttgatttagaaaatggccctctttttaggattagaatttttaatctggataagaaaaagtcttatttatatatcaatttacatcacattattacagatgagtggagtgtaaggaatttattagatgaattaatgaaggtatatagtgcctttgcaaaacgtagaaatcctgagttgccaactatctctaatcgatatgtagattatgctgagtgggaacaggagcagttaaatttaggtcggtgggatacggaaaaatcttattggatggccgaacttgcagcacctcttcctatactaaaccttcctttagattttagtgggaatcgtcaaagtacaaataagggtacagtatttgaaatgaagttagataatgaaatgaaagagtctttgaaacaagtatgtgaacaagagaatgtttctatgtatatgctatttttagcagcgtatattcaattgttacattatctaacggatcaaaaagatattattgtaggtacaccggttgttggaaggaatcatcaagaatttgaacaaatacaaggattctttgtaaataccctagcaattagaacacaattgaatgatgttaaaaatttaacacagctattacaagtagtgagagagaaatgtttgaattcattccaaaaccaatcatacccatttgataaagtaattgaacaaataaatcctgatagaagctatggaaataatccgatcttttctactatgtttagttatcagaaagatattctgcagcaacatgatgcgtataagcttcagttgttacctaataaacaagatattagtaaatttgacatttctttagctgttgaagaaggattggattatgtagggatttcatttgagtatgatattaatcttttcaaggaagagtcaattaataggtttactcaaaatttacttactatactggacgcctttattcatcaacgaacagtagcatatgaaaatctttcattcctatcacaggaagaagaatctttatataaaaaggtaaatcatacagaaagaccctatccttattttcaaaatatacaggagcaattctatatgcaagtagatagacaatccaatcggattgctatagcgactgaaacggaatctttaacatatagacaattaaatatgtgctctaatcaagtagctcaacatttactcgaaaaaggtataaaaagaggtgataaggtagccatatttttagatagaagtatgaatagtatcgtttctatgcttggaatattaaaagccggtgctgcctatataccaatcgatgtaaaataccctaaggatagaataaattatatagttcgtgacagtgaggcatgtagaattataacgagtaacaaattcaaaaatcatttgaatgtaagtgattataaggtttcaataatagaggatatatatcgtacaactataaatgatgatgtgaaaattttaaataaaccagatgacttggcatatgtaatttatacttcaggctcaacaggaaaaccaaaaggtacattattaacgcataaaggagtattaaatttagttgaatggagaaaggaaatatttcagatctctccaaatgataaagtaacacagttttattctcatagttttgattcttcagtatcagaaattttttctaccttgttaaatggggcggaactatatgtattaagtgatgaacagcgctattcaactgtcgcatatgttcaagctattcaagaaacacaagcaactatttctgacttaccaacagtttttttcaatgaattatcaacttcattaactaaactggattgcgaaaagatacgttctttaagatttataataatgggaggggaagctgcatcaacaaatgctattagaagttggcaaaatacttttaaaaaccaagtacaactggtaaatgagtatggccctactgaagcaaccgtttcagcaatgtattattttataccagttttagaaggcgataataatcttttaggaagcataccaattggtattcctatttctaatacaaaggttcatatattgaattcatatatgcaacattgtccggtaggggctatgggtgaattatatattgaaagtttaggattggcccaagggtattggaagcaggaagaaaaaacaaaacaggcatttatttcaaacccattttcagaagacaatagtaaaagattatatcgaacaggtgatttagcaaggtggttaccaaatggaaatatagaatttatggggagaaaagataagcaggttaaaattagagggcacagaattgaattaggtgaaatagaagatgcaatgttacaacttgaggggattagtcaggctgtagtaacacaaacggaagatggaatgttactgcaagcttattataaaacagtggacggtatagggatagagaaaaataagttagctttacatttatcaaatgtattgccagaatatatggtccctaaatattactctcatgtgttagaaataccaataacggcgaacggtaaaattgattttgaaaagctgccaaaaatagagtttggtcatgagcaaaaagatgagtgtaaacttaaacctcaaactaaagtgcaaaaagacattgcaaaggtatggtctgaagttctaaacgtaaaatctataggtttaaaagatgatttctttaatttaggtggacattctttaaaagttatgccagcattagtcaaattaaaaccgttataccctaacttgaaaattcaagatttctttaagtatagaaccatagaaaaattagcctctcatattgaagagatggaagatatatcgttcaagaaagagaaaaatatgaatgtagcatgtatggaaaatgaaacgaaaacgactcgtgtttatgaaacaactaaattagaagaatgtgagttagatatggtgaattatccaaaggcagtttttcttacaggggcaacaggatatttaggagcacatattttagaacggttattacagttaccatctacgactatttactgtttagtaagaaaaagtgagggtcaagtaattggtgcaaagttaaaagaaagaatggagttttatttcggtaaagaaatcctccaaaagttgaaggagagagtagaattaattgaaggagatttatctttgatgaatctaggtctagattcaaagcaattggaccatttaaagaatagggtagagtcaattatacattgtggtggagaagttagacactatggagaacgtgagcattttcaaaaggtaaatgttcaatctacaaaatacttattggaattagctaagaacacaaaggcacgttttcattatatatcgactttaagtgtagtaggtcaggctgaaagtgatccaaaagaatttgaattctttgagtctaattttgatagagggcaaaatttagataatctgtacctggaaagtaagtttcaaggcgagaaaatggtcagagaagcaatggaaaaaggagttcgtgccacgatataccgtgtggggaatttagtgggtaactctaaaacaggtaaatttcaatacaatattaatgaaaacgcattttatagattattaaaagggatatgcctatctagcatagctcctaacgttaatacgtatgtagatttaacgcctgtagactatggaagtttagctattactgaattatcttataaggccaatacagtaaataaaaccatgcatatttgtaatccacatcagcttaaatgggaccaatttattaatagtttacaagcttttggatacgatatcctgttaatgaaacaagagaagtatatagagaagttttttaatacgaatctaactactgatgaacagaaagctttagagctcataatgcctttattagaatctgtagaagagttatcagtagctataccatcttgtttatacacgcaaggatatttgaagaatgtatattgtttagagccaaatcaagagtatatcaatttgttattaaattatgctatggatataaagtatttaccattaattaaagaaccaatactgttgtagtataatttatcaattttgaacaaaaaagaacctgtttttcattgagaacaggttctttttctggaaagagatctacttattggtatggaacagatttcttttcaatagggttgggaacgcactattgaaaatatgaatatacaattatgcgtttttaaagtaataaaatttgatatataattgaaaagtttttgatagatagttttaaattctttttagaaatttatttattaatattaaaaattgaaggtgataccttgaagttaaatgacatttaatgcattctagagggggagttaagttgatggaaaatgaaaacatatcaaagaaagaaaagattatgaatacaatattggagttaattaaagatgaacgtttgtaaaaggtatttattgaaaaaacgtttataaaataaacttaatcacctttataaactggatattccaatgtttcgtatataaaccctttttgtttgtaaagctatatcttcataaactccattcacttatcccattagttgatttaatattttagttggtattttagagaacatcgactttccgatgcaaaatagtccatatttagccagaaaatagtattagtgtacaacaaacatcttaatctatgtcaaaattttgtctaaacgtacaattttcttttttgatatggtgactccatgcccatcaacttaaggatagaaactctacggttttccattaattgaaatgaataaaaaatgcacctccaattgttagactgtgtctaacaattggggtgcacttcagtgctgagatgcactttgaacggctttttttatgagaattgtttaagtgctctttcggctagtaaagcaaagtattctgcacttataggcagtgcctcttcattaattgtaaaagcaggatgatgccattcatgtgtaccgctcgttcccataaagacgaatgaacctggtatttcctgttggtaaaatgagaaatcttctccagccattgacggactaggcgagatgatattaagattcatctttgtggcaacttgagtagataagtctgtaagagctttatcgttgtgaacagcaggaggacctgaataaaaacggaatttcgtttttacacctaatgcatcagatacacctttaataatacgctccatgagtgctggaatcttttcacgtgtttcagcttggaatgtgcgaatcgttccttctaacgtagctttttcaggaatcacgttccacgtatttcctgcatgaatatttgtaacactaacaactgcattatgagatgaacttatatttcggcttacaattgtttgcagtgccatcacaatttgagaggatgcgacaataggatctactccagcatctggtacagccgcgtgtgtaccaactccgtgaatttcaatttcaaatcgatcaactccggccatcagtggaccatctttaatgccaattgtacctattggtaaatcaggtttattatgcatgccgaaaatcgcttgcacattacgtaaatgtccagcatcaataactttgcaagcgccattactactttcttcagctggttggaatatgaagcgaaccgttccatttagggaagattctctttcttttaataagaaagcagtacctaaaatagcagctgtatgaaaatcgtgtccacaagcatgcattttccctcgtactttagatgcataggacaaatgtgtttcttcttgaataggaagggcatcaatatcagcacgaactgctacaattggtccgtttttattaccagacacttcagcgataattcctgtttctaaattggaatcaatgatagtaatgtttttttcttctaaccaattttttattgcttttgttgtttcgaactcttcatatgatagttctggatactcatgtaaatgtcgacggatggaaataagtttttcttttagttgatttgaaatagataccatgtagtatgccttctttcttcagcaaaatatttatcataagtatacaacaataaaagagaggattctcaaatgaaaatcctctctcgtttatcccataaaagcccgattggttcaactaattaaagtttcactttatgctgcgacttttttatgcgtatgatgtttacgataacgtccacgcattgcgtatgcaatttgcgggattgcaatcccaattaatataagtgatacaccgaaccattgtgaagatagtacagcctcttttaaaacgaatactgacataattgttgtaactggtagttccgctgcaccaagaatagtcgctaagccagaaccgatttttggaatcccgattgtaaaggcaatagatggaataacgatactaaatgttcctaatcctaaaccgtatttccaaagaccttgagaaatggcaccattaaaaataaatgttggtgggaatacaatcatgactaaagttaaagcaccagtcattaagagaacaccgcgcggtaatgaaggtacttcaacagcaacttttccgcttacgaaaatgtatgttgcgaatgtaacagcagataataaacctaaaatgaccccagtcgtatcgaaagcacctactgattgttcaagtaaaccacttgataaaaatgtccctacaagtaagaaaataacagaaataactttttctcttgaaggtaatgtttttgttgcgactgcttcaatgataattccgacccaaacgaattggaataaaagaataattgcaatagaagctggtacagtttttaatgaagcataataaaaaattccggtaaaacttgcagatgttcctgcaacgaataaaagtaatgcttgctttaaaggaacgcgatgtctagaaaatagaagtgtaatagcaagcaaaataatccaaccgaacaaatattggctgccaattacctctccaagtgaaaatccttctgcatatgcaagcttaacaaaaatagctaaaattccataactacacgctcctaataaaactaaaagagaataacgaagcatgaaaaattcctcccatctatatgaagttgttccgtatcgaaaatatataactagagggaagtatacaaaattagaaataaagggtcaaatgaaagaaaagtatgacattttatagaataataataaaagtatgatatttatgcataatcttgaaatttttaatagtagaagtattataaaataaactttgcattgtatagagatagcatttgaaaaaaaatattttttaaaccaatatgtatatagacgtactagtaacgtgctaattatttgagaaactatgttacctttgttatggtaataacaattaaaggagttttataatccatttgggttttttctatataatagaaggaaatgaaaacgttttattagaaactgtgaggaagtgcggtttttcttattgccacgttgtaaaagtgatttcacgaattgttcatagtatttttatgtgtttttgttacaatatttagggagaggagtggaatgatgcaagatattagtatttttttagcgtttggcgccgggttcttatcatttatttccccatgttgcttaccgctttatccggcatttttatcgtacataacaggtatgtcggtttctgaattgaaagaagaaaatgcaatgcttcgcaaaagaagtatgatacatacagcgtttttcttacttggattttcaattatatttattgcaattggatttggtacaagttttattggaggaatctttactgactataaagatttaatcagacagttaggtggtatatttatcatcgtgttcggcttaattattgtcggggtgtttaagccgaaatttttaatgcaagaccgtaaatttacatttaaaaatcgtccaagtggctattttggatcagtactaatcggattagcttttgcagcagggtggacgccatgtaccggaccaattctagtgtctgtaattggattagcagcaacaaatccagaatcagcaatgatatatatgattgcttacatacttggatttgcaatcccgtttttcgtactgtcattctttattacgaaaatgtcttggattaaaagaaatagtatggccttcatgaaagtcggaggatatattatgattgttatgggtgtcttcctatactttaactggatgacgaaaattatcgtatatttctcaagtttatttggtggttttactggtttttagtattattctgcgaaaatgttggaaatactaacggaaaagcatataatgaaagtatattttgcatatagccacaaaaaaggatgagaaaatatgaacatagttcttttatcaagtatcgttgctgtttgtatggctgtcggtgcgatgtttattcgtttaaaagcagctaagaaacctgcaacattgaaaaaaattatacttccaccattttttatgagtacgggtgcattgatgtatgttttccctgaatttcgattaactccagcagaaatgttagaagcaattggtgtcggtttgattttctctatttttcttattaaaacatctaaatttgaaattagaggacaagagatttatttgaagcgttcaaaagcctttgttttcatattaattggattacttgtagtgcggattgtatttaaaacctacttaagtcaatctcttgatttaggacaacttagtggcatgttcttcttacttgcgtttgcgatgattgtgtcatggagaattgcaatgtatcgttcctttacgaaattacagaaggaaatggaaaaagaagatggtttttataatgaaaaagatatgaagctaacttaaaaactgtatatgtaccaaataaaaagacagcgtcaaaggcgctgtcttttttatcgaaaataatatgaagttactttgcgagtaaagatcgatagttagaataatcaatctttttttcttgtagtttttttattaaaaatttatgatcacgctttggtgtggcaatgatatatcccttaataatcaagtcttgtgtaatttgagaggcattttcttgtaatgcaagttccccgattttgccagcaatctttgattttgcaacatcacgaaatagttctggaacaggacttacaagctcttctaacaattgtttttgttcatcatcccataaatgtctcgttttatttatgtagtgttcttcccaatccaaaatggacatgccgtcttcttttggtaaacgttttaaaaattttctgaacataaagtatccaccgatagacataagccctaataaaataaccgtccataatacaatgaaccaactgaaccatccttcgagcacgcatatccccccttaatgatagcggttttcttttattcatattatatacagtgagattcatagaaagcaagaacgcttggtcattttgaccaagcgttatagtttaaacgaagtatagttgttcaacacataaattattattatcgtcttcaacatactcaataataagtgtgccaactttacgatctttatcttcagttgtgaaaatagagtaagaagtaaaacgtgtttttgataggccgcttatatgtgtaggtaaagaaatgtagtcgttatcgcggaagaattccatcagttcaatatcctcaaattcttttcggtcaacttgtttgtttgtatagcggcgttgaagttgttttaaagattcattccaagaaattgcttttgtgtcgtataccattgttctatctccttactgtatgtaattactaagaacatacgttctaatctagtatactctttttattagaaaagggaaagcaaaaaataatgtaagcttggatttccaagcttacattattgatgcgtccgtcataatctctatttttcattataagttagatatgaataagaaacaagatgatatatataatgttgagagttttcaagattctgtatattataggtgtactaaagtgtaagggaatgagaggtgtggcatacgtaatttcactgcaagggccgatggctagcggaaaaacaacattagcaaaaaggttagaaaagagagggtttcgagttatatatgaaaatccatatccaattgtagagaagcgaaaaaaattgaatttagatatgaattcaaaagtagggtttattatgaatcaaaaaatgtttatggaagcaaaaataaaggagtttcaaaatgtgaaagattcagtcgtaatttttgatcgcggaccagaagacattgagttctttacactcttttatccaacgattataggagaagagtgggatatagaaactgaattgaaagatgaattatataaattaagagcatgccgttcggatgtgattttttacttagatgttacgaaaaagaatgtatatgatagaaaaaataatgatagaacaagaaacagaagtacgtttgaggagcaatttaaattagtagaaactgaaaaagactggtataaaaaatttcctgtaacttatgtggacacgaatagattaacagtggacgatttagaggtatattttatggactggttaaaggagagagggctatgaaaaaaatacttttatttgtatactcaacatttgcagagtttgaaataacagtagcgacggcattgctgaaaaataaatatgaaatcattacagcgggcttaactaaagaattggttataagtgaaactggattgcaagtgcagccgcatatagaagtaagtgaagtacgtgtagatgagtatgaggggatacttattccaggtggagaagaaggacagttggaagatgcaaaacctcttttttcaatcattcgtcaatttcatgaacaagaaaaattagtggcggcaatttgtgctggaccgtatgcactagcaaaagcagggttatttaaagggattgcttatactgcgactatagattatcaaaaatttgattgttttccagtagaaaatttcgtgtatgaagaagttgtgaaacactcaaatatcattacagcacaagggcatgcatttgtaccatttggaatagcaattgcctcttattttggagtggcagacgaacataatacagatttttattgtggtaaaggcaatgtagtaatggagaaacttttacgagaaaacgtgtaaaagctagcaaatgctagcttttttctttttgacatcgataaatggctaacgtttttgggtcacgccatataccgttatgaagtgacaattcattttctacttcttcttttagccataccttcatttccgcgtgaaggtatgtattatcaggtatatttagcgacggaaacatgctagaaatatagtttacaatcggagtagcatgatgaaaaacgagagcattatgaataactgtttcttcaacagttggaaaaacagattgtaatatctctttaccgttttctaaacaaaatggagtgactgatgatgttgttttcggtaaatcaaatgcgtctaacatacggttacacatttcaactatacgaggtagtgtaacgctagaatttgttgtagctaaaagtgttccgccaggacgaattactttatggaatccttgaatcgttttttcaacatctttcacatggtataacatatgtcttgcaattattaggtcataacaatttgtttcgaaaggaagtttactagcatcccctcgtttccattctattaagttatttgttttagcagcttcagcaagcatagcttcggattgatcaaacccggttaatgggcctttatgaccatttgtttgtaaaagggaaaggaattttccactagcgcacccaacctctaatatattttcttccccttgaagttgtaaatgttcaatgacgatcttatctaaatctacgtgtttttcttcgtaatgtgtatgtgtgtcgatgcgtgtttgtaaatggttgctaacgttatactgacgttttacatcattcattttgtcacattccacctttgtgcaaaattgttggattgcatgtgttaatacatctgttttctttaaaccttcgtaatggagtgctgattcaaaccttttaagtaatttctcttcaattcgaaaatgaatatattttcgttttgtcactgaaatttcgcccctttgcatctgttagtgagactatagcatgcttggaaaaattgtgtaaatcatttgtgtacacaaaattatggggatgaaaaaaatgtttgaatatgattttaaactattgacgatttaaacgttttcatatattcttaaattaagtaatattcaaataattcaaaagaaatgagagagtcacatgcttcttcaaggaacacatcgaattggtcgtatggccatgctgttggcacttgcggatgagaatgaaagtcctgtattatccattccaaaaggttggaagtattgtacggggaaagtgggttcgatgaattcgcaaaaggttgtcgcagcaatggaaacagcggctaaaagcaaccaagttattgaaacagacgtttacagagaaacacatgcactttatcatgcaattatggaagctttgtacggagtgacgagaggtcaaattcagttagcagacgttcttcgtacagtaggacttcgttttgcgattgtgcgcggtacaccatacgacggaaaaaaagaaggcgaatgggttgctgttgcattatatggaacgattggtgcacctgtaaaaggatctgagcatgaggcgattggtttaggaattaatcacatatgatttgcccatagtctattagttagaagggggccttacttttttaggacagaagtctgtcttaaaaagataaggtccccttttgcctttttaaggaggaaaaatgatgattacgttaacaggacatacattgacagttgaagaaatgaagaggttattactggaaggagaaggtgtaacagcttgtccaactagtatgcaaaaggtagcggagtgccgcgaagtagttgagaaaattgtagaggacggaaaagtcgtttacggaattacaactggatttggaaagtttagtgatgtgcttatccaaaaagatgatgtaaaggcacttcaacataatttaattcagtcacatgcatgtgggattggtgatccattcccggaagaagtatcgcgtggaatgttaattttacgagcgaacacgatgcttaaaggagtatctggtgttaggccgcttgttgtaaatatgcttcttgagtttgtaaaccgtaaaattcatccagtcgttccgcaacaaggttcacttggtgcaagtggcgatttagcacctttatctcatcttgcgctcgtattattaggcgaaggtgaagtgttctataaggggaaacgcgttcatgcaatggttgctcttacagaagaagggcttgagccaattgaacttgaagcaaaagaaggtcttgcgttaattaatggtacgcaggcgatgacagcacaaggagttctttcttatatagaagcagaagcaacggcgtatcaagctgaactaattgcttcgatgacaattgaagggttacaaggcattattgatgcatttgatgaaaatgttcataaagcacgtggttataaagagcaagtggaagtagcgagcagaattcgtgacattcttcatgatagtaaattaacaacaaaacaaggagaactacgtgtacaggatgcctattcacttcgctgtatcccgcaagtacacggtgcttcttggcaagttttaaattatgtgaaagaaaaattagaaattgaaatgaatgcagcaacagataatccgcttatctttgatggtggggaaaaagtaatttcgggcgggaatttccatggtcaaccgattgcgtttgcgatggacttcttaaaagtaggaatggcagaacttgcaaatatttcggagcgccgtattgagcgtttagtgaatccgcaattaaatgatttaccaccatttttaagtccagaaccaggacttcagtctggtgcaatgattatgcaatatgctgcagcgtcactagtttctgaaaataaaacgttggcacatccggcgagtgtagattcaattccgtcttctgctaaccaagaagatcatgtaagtatgggaacaattgcttcacgccatgcacatcagattattcaaaatgcaagacgtgttctttctattgagatgatttgtgcgatgcaagcagcagaatatcgcggaattgaaaacatgagtacagtgacgaagagcttctaccatcaaggtcgtcagcaggtgccatctattaaaaatgaccgtatattctcaacagatattgaaaatattgcgcattggttaaaaacgaattattcgataaaagaaagattagatgtaaacgcagcactataaaatgagaaaagggagagattgaaatggaaaaagtacaacaaacaattcgcgcgccaagaggtacagagttacaaacgaaagggtgggtgcaagaagctgcacttcgtatgttaatgaacaatttagatcctgaagttgctgaaaaaccagaagaattagttgtatatggcggaattggccgtgcagctcgtaactgggaaagttatcaggcgattgtagattcattaaaaacgttagaaagcgatgaaacgttacttgttcaatcaggaaaaccagttgccatttttaaatcacatgcagatgcacctcgcgttctgttagcgaactcaaacttagtaccgaaatgggcaaactgggatcacttccgagaactagagaaaaaaggtcttatgatgtacggacaaatgacagctggtagctggatttacattggaacgcaagggattctacaaggaacatatgaaacatttggtgaagcagctcgtcaacatttcgatggttcattaaaaggtacattaacacttactgctggtttaggtggtatgggtggtgcacaacctcttgctgtaacgatgaacggcggtgttgtcattgctattgatgttgataagcgcagcatcgatcgtcgtattgaaaagagatactgtgatatgtatacagaatcattagaagaagcgttaacggttgcgaacgagtataaagagaagaaagaaccgatttctattggtttattaggaaatgcggcagaaattttaccagaactagtgaagcgcaatattacaccagacttagttacagatcaaacatctgctcatgatccattaaacggttatattccagtaggctacacgttagaagaagcagcgaaacttcgtgaagaagatccagaacgctacgtacaattatcaaaagaaagtatgacaaaacatgtggaagcaatgcttgctatgcaagaaaaaggcgcaattacatttgattacggaaataacattcgccaagttgctttcgatgaaggtttgaaaaatgcattcgatttcccaggattcgttccagcatttatccgtccattattctgcgaaggaaaaggaccattccgctgggtagcactttctggtgatccagaagatatttataaaacagacgaagtaattttacgtgagttcgctgataatgaacatttatgtaactggattcgtatggcacgtcaacaagttgaattccaagggcttccatcacgtatttgttggcttggttacggtgagcgagcgaaatttggtcgcatcattaatgaaatggttgcaaatggtgaattatcagcaccaatcgttatcggtcgtgaccatttagattgtggatcagtagcatctccaaatcgtgaaacagaagcgatgaaagatggtagtgatgcagtagctgactggccaattttaaatgcattaattaatagtgtaaacggtgcaagctgggtatctgttcaccacggtggtggcgttggtatgggttattcacttcatgcgggaatggttatcgttgcagatggaacagaagcagcagcaaaacgaattgagcgcgtattaacttctgaccctggtatgggtgttgttcgtcacgtggatgcagggtatgacttagctgtggaaactgcgaaagaaaaaggcgttaacattccgatgatgaaataaggaggagaaaacatgctggacactttactaataaatatcggtcaattactaacaatggatcaagaagatggcttgttaagacgggaagcgatgaacacgcttcctgttatcgaaaacggtgcggttggaattgaaaatggtgtaattactttcgttggaacagcggaagaagcgaaaggattacaagcgagagaagttattgattgcggcgggaaaatggtttctcctggtctcgttgacccgcatactcatcttgtatttggtggatctcgtgaaaatgaaatcgcactaaaactacaaggagttccgtacttagaaattttagaacaaggcggaggcatactttcaactgtaaatgcaacgaaacaggcgtcgaaagaagaacttgttcaaaaagcgaaattccatttagaccgtatgctatctttcggagttactactgtagaagcgaagagtggttacggattagatgatgagacggaatggaaacaattagaggcaacagcacaattacaaaaagagcatccgatcgatttagtttcaacatttttaggtgctcatgcagttccgaaagagtataaaggtagatcgaaagaatttttacaatggatgttagacctactaccagaaatgaaagagaagcaattagcggagttcgttgatattttctgtgaaacaggtgtgttctctgtagaagaatcaaaagaatttttattaaaagcgaaagagcttggctttgatgtgaaaattcatgcagatgaaatcgaccctcttggtggtgcggaagcagcggcagaaatcggtgcagcatcagcggaccatttagttggtgcttctgataaaggaattgaaatgcttgcaaattctaatacagtagcaactttattaccaggaacaactttctatttaaataaagaaagctttgctcgtggacgtaaaatgattgatgaaggtgttgcagttgcgttagctacagactttaacccaggtagctgtccaactgaaaatattcagcttattatgagcattgcgatgctaaaattgaaaatgacaccagaagaagtttggaatgccgtaacggttaactcatcatatgccattaaccgtggtgatgtagctgggaaaattagagttggtcgtaaggcagatttagttttatgggatgcttacaattatgcttacgtaccgtatcattacggcgtaagtcatgtgaatacagtatggaagaatggtaatattgcatatacaagaggtgaacaatcgtggagcacggccactatttaaagaaaaatgcaaagtttattgatcgtgaagtgacgaaatggagtgagatgattaaagattgggaggaaggtgtggaaatattcggtgctgccttaattggagcacccctttctaaaccgtctattagtcattcaggagcgagttttgcgccaaaaacaattcgtgcgatgttagatgcatatagcacatatgcaattacagaagaacacgatatgaaagaaagtgtcttatatgattgcggcgatattacgatgcatgtgacggatataaaagaaagtcataaacgaattgcgaaaacagttgggcatgtaacgaaagtaaacccgaacgtgataccaatcgttcttggcggtgaccactcgattagttttccgagtataacaggttttgcaaacagtaaaggaaaggtcggaattattcaatttgatgctcatcatgatttacgtaatttagatgatggaggcccgtcaaatggtacaccattccgtagtttactagaaaatgatgtcattactggaaaacaacttgttcaaattggaattcgtaatttttctaatgcacgtgcgtaccatgaatatgcaatagagcatggtgtaacagtgtatacaatgaaagacgtacgagagcgagaaataaaagatattatcacggaaagtattgaagtattaagaaatcaaggtgtgacttctatttatatttctcttgatatggatgtgctagaccaagcgtttgcaccaggttgtccagcaattgggcctggtgggatggatagtacgactttactagatgcgattgaattccttggtaaagaatcgctcgttcaagggatggatatagtagagattgatccaactcttgatttcagagatatgacgagtagagtagcagcgcaagtgattatgagttttcttttagcgagggaaacagttagcaaacaggttagtatatagacggaaaagtagatatttatttatgccttatcaaaaacacatcactacttaaatgtagtgatgtgtttttgtgttaaaggagaatgaatgtgtgtggaaccgttaatggaattgcgatttttataatgtattgtgtaaatttaatttcttgcttctgaagtattgactcgtaaaataattttatgataaaataaaaattttgctaaaaaactaaaagtatgttaagcttgagaaggttaccatatatggaggtggattatttgtttcaaattggtgataatattgtttatccaatgcagggagcaggtataattaaagccatagaagagaaggaaatctcaggagaaaaacaacagtattatgttataaaaatgtcggctagtaatatggaactaatgattccagcagggagaatattgaattcgaatatacgaccagttacggatataaccgcattagcacacataatggatatttttcaacatggggaatcagatagattacttacgtggaaacaaaggtataaattgaacactgataaaataaagacgggtaaaatgcaagaaggtgctgaagttgtgcgtgatttaatgcgtatacagaaagaaaaagcacttaatgcaagcgaaaagaagatgttagataacgcatatgaatttttgattagtgaactgggattaattgaaggtatcacagaaaatcagataaaaagcttttgttaaggttcattacaaataatgtattatatcccaaaaaagatcttgaattttttgggaacataattatagaaaatttatcatttcaaagacattcaactctttcaaaccacttttagagcattacctctattgttattactacaatcaaatccatttttattttttaatttcatttatgaatgttcgaagtttaattgaatacttcgataaaatagttacttgatttttgcaatcctgattcacactggcacggacgaggagccgtaaggatgaaagagaggtagggctttcattgttttaggtatataagttattatttttagaagaatactgaaccattttcacttctattgataaggtgttttttattaaagagataaacgaattgacagccatatatggtcaacaaaaaaggtttcctcctaaggaaacctttttaatattatttgcagtgttttgtttttgaatattcgaattttttgttataaagtcgtaaaaattgacgttactatctaaaagtaagtatgatgcgattatagtaagattttttaggggggaagaaaaatgacaagttcaagtaataaagcagcgagtatttatgaaggaacaaatgtaaatgctgggggattttttgaaaacgttgaagaaacaaagttgtttgatccaattcaagttggagcttggtctcttcgtaatcgtatagtgatggcaccgatgacaagatgctttgcagataatgagactggagtagttggtgctgatgtagtggagtactacaggcgcgacacgtttctctataagcgtttagacgtgaagtgagagtgttgctgaaaataagccaatgactcctgataagccaatggaaaaggaagacatgaagcctgataaaccaatgactcctgataaaccaatggaaaaggaagacatgaaacctgataaaccaatgactcctgataagcctatggatcgggagggagaaatgaaaaaagataatgatatgaaacaagataagccaatgactccttgggaagaaatgaaaccaagtgacgaggggagtgaactttgttggcatgtagtgaatggaaaatgcggataaagaaattttttatagtagtacctgtattacttgggattttgtttgtaggtgatacaagtgcatttgctcaaggtaaagatgtattaagtggaagagtaggtaaagctcaatatggtagttcatatataacttcattaactgatggaaatttacaaactagtgatactctttctaatggtgaggtcataattgatttagcttctcctgttagagtttcagggtttaggtttactaaagttggtggctctagtaatagaatggatgtttatttttatacagagggtgctactttaaagcgggaatatagaaatactgatagtggttatctacaagctgttgatattaaaggtgttaaaaaaattggattgaaaaatatgagcaatggagattattttacacttgctgaagttaatttatatgagtatgaatctgttcctccatctgatattacggatttaaaagaaaatattaaacatgattcagttgaatttacttataaaaatccgaagtcgaattttagtcatttaagaatttatcgtgatggacaagtgcttgctagtgatgtgaaagaagaaaaattcactgataaaggtttaactcctgaaacggagcatacttataaatttgtttcggtttctcctgatggtcttgaatcaaaaggtatagagaaaaagataaagacagtgaaagagcctttgccagatgaaataaaagacttacaggaagatgaaataactcatacttatgtgaaatttagttataagtttcctaaaaataattttgatcatgtgaaaatttatcgtgatgataaagtgattgcggataatgtgaatgttgaggaatttattgataaaggtttaaaaggaagtatggaatatacttataaatttgtttctgtttcttctactggtcttgaatcaaatggaattgtgaagaaagtaaagactgatgaagaacctaatcttaataagccttttaaaccttctaattttgatgttacgccaaaagatggctcgttagttgtaaatctattaagtcaaaatttaggcgttccaattaagggttatcacatttttattgatggtgtaaaagttaatgattcacttgttacaagtcgttcttatgctgtgaaaggtttacagaatggtcaaacttatggtgtacagattaaggcggtttctaagtggaatattgaaagtgatttaagcaatgttgttaatggaattcctaaagtaccagttattcctgaggttacttttagttttggtttaggtgctttagttgatgggataacaaattggttcctggggatatggccgattgtggcatttagtattgctattccgttagcatttattgttgcgtttaatacgaaaaagttgtttatgaggtaggggaattaactgttaaaaagattataaaagtctactaattgttagtagactttcgtttgataattaaatcttcaattgcttcatctaataatttactcattggaatttttgttttatctgatagttcttttagttgtttgtacaattcaatgcggacggcatttgataatgcttttcttgtttttaatccacgattttcgctcatattcatcacctctaaacaaattatagaatacatccaatcgacttgcaattgaatgtagttgaatgtacaatgaatttaggaggtgataaataatgatactagtgaaaaaagttcgtcttaaaccaaatagagaacaagaaatgcaattatggaaatctactggaatagccagatgggcttataattgggcattatccagacaagaagaaaattataaacaaggtggaaaatttatatctgatggtactcttcgtaaagagttgacacaattaaaacaaactgaagaatatgcttggttgtatgatgtatctaataatgttacaaaacaagctgtgaaagatttatgtgaagcgtataaacgtttttttaaaggggttgtagataaaccgagatttaagagtcgtagacattctaaaccatctttttataatgataacgtgaaattaaaagttatgaaaaatatggttcttattggaaaagtaggttgggtgaaaacatctgaatgtataccagttgttaataaatattcaaatcctcgtattagtttcgacggaaagtattggtacttagctgttggaattgaacaagagattattcatcaagagttaacaaatgcaagtatagggatagatgtcggtattaaagaacttgctttttgttctaatggaatgaaattcaaaaatatcaataaaacaaaggtagtaaaacaggtagagaaacgccttcgtagattgcaacgtcaagtttctcgtaaatatgaaataaataaggagggaagctgtttcgtcaaaacaagcaatattataaaacttgaaaagaagatacaacatttacatagacgtttgacaaatatccgagataatcatattcatcaagtgacttgtgcaatcgtgaaaaccaagccttgcagagttgttatggaaacgttgaatatcaagggtatgatgaaaaataaacacttatcaaaagcgatcgcacaacaaaaattatatgattttaaaatgaaaatgaagtataaatgtgagaaatacggaattgaatttgtagaagctgataagtggttcccttcgtctaaacagtgttcaaattgtggtgaagttaataaacatttaacgctatccgataggacgtatcattgtaaatgtgggcatcatatagacagggatttaaatgcatctattaatttgtcacgctatcaattagtaaattaacactaaaacgttattgctaatatgtaggattcgttgtatccgaatttacgcccttggagtgttatgtcaaacgaaagtagcttcggcaaaatcggacacgtagagtagggaagtaaacagactttataaagttttataaggttttggcaacggtgcttagtttgatacaaccagttacaactaaggatttaatacaatttctacagtatgcgttccatgctggggaagacgtattatttctagcgtttgtattaatgattacattctctgttgctataagcattagaaggattatggtgggttataagcaatcatgatggagaagtttgttaagttcttaaaaggtggatttgaagcggttataaagtcgttaaaaacgtttattgattttttagctacaccatttcaatatctactggattttttaaaaggaatcttttatttcatagaaaagctgtttcaagttgtagtagcaattataaaattattcgttgccttgtttcagtttttaggtgctgtaatagcgggattctttaaaactttatttctatgggtacagcctaattttgatggtgggaatgtatcgtttcctagtgcatcaatgaaaggatttaaagtggctactgatatattacttcctactggattacttacagttattccggctgtggtcacatgttttatttggtacttgtttgttaaaaagctcatggatctattcagaggtggtcatcattaatgaatgcgttaattgatacaatatttaatcctgttcttggttggcttgcacaaatggcaaagtatttaagtgatttaagcgtaccggcaagccgtcctttgcgaattagtgattaccttggagtatttgcttatttatacggttggacaaccgtcataacgacgttattcgctttagttttcgtatattttgtttgttacatcatcatgacttacagtagtttgtttattcgatttaaagatacagtgaaatggtggtaatgatattgaatattgtagggcaagcaattttattaatattttttacgacagttgtttcttggatggtaatagatacattgaatttctttagagggatagaagaatgatttatgcaattttgggattcattatttggattttgattttgatttgtgaagcaacatcgggaaaaggagagttaaaataatgcaggcttttaatgcgatgtttgagttatcaagtgcagtttgtttatctatatttctttttatagttttaccatatatgtttttcaaaaataaaatgtcaaagtgataaaaacgaatgttaaatattaattagtttatatagttcgttaaaaggattcaaaatgtcatggcagcgggactagatccaagaggttttgaaatgaaaaaacgaacgttttggaggtttttataaatgttagctaaaacaaaacgaaaagtacagccacaatttgaagggcatagagcgttgattattaaggaagaaggaacatgtgtagttgaacaggtcatatcgtttgattcggagattttagaaacgagtacagccatgttaccacgtgaaaatgaattgagattacttgatgataatcatggttatgtgtatcacatttataacctagaaaagcccgcaagaattgaagcggaaaatttgaaaatgttacgtcgttctagtgcgttaaaggggatttttgattttgatacagggaagaaaccttttgacattattggttttatgccttgggtaattattgtattgctagctatttttaaataatggggtggagtaaatgagtgttcaggaaatgttaacgaaagatattttagaagaagaaggttcaaacgaaacgattgagactgttcaactgtttcaattcatgaaaaaacatgctgtgccattaacaaagaaacaacaaatggctatgttattgcttaatgaaaatggattatcggatatttccttatatattgcgggaatgaaagaagaagtattgccattaagtgaatatcacaagacacttgagaaattaacgctttcggaccgaattaaaggtaatgctaaattaagtcatttactgaaagcaaatgcgaatccttcattatcattgtcagcaaatagcgcaaaagttgttaaagggaatgagttagcatgaacataatggtttttgagggctttctcggtagcggtaaaacgtttggtatgagtttgtttgcaaaacactatgaagaaaagagtggctgtgtattgtacagtaattacggtttaattgggtctaaaccatttgtaactttagatacgtttcatgatattgcaaaagagaaatctagtatcttaaatctcgatgaagcgcatattgatcttgatgctagaagtttttcaagtaactcggtaaagttcttttctcaattgtcttattaccttagaaaactacgttgtacgttgtttattacctcaccatcatttgatgatttagattcacgtataagaggtattacaaacgttctcgttagggtatcgaatgataaaaactatttttattacaaaatgtatgatgttcaatctaaacgatatttaaaaacaatgcgtattcaaaagaagaaagcttttgctattggttcaaaagtttatgatacgacagcaatggtttctccagtacaagttccagataaacgacaagacttcatggaatttttagaagcgttgaagtcgaccgccgaagagtacggacgccagtacaagcattcagcgtaagctgtatgcgcggtgcaggcgggaggacttcataagattatataaattaaataaggaaggtacgttatagatgggaattttaaagaagaaaaaatttagagaagaagtgaaaagaataaataaagcacatggagaaatgagagaatttctagatttgctcatggatcgctacggattagatgaagaagaagtaaaaaattgtgaagtaattaaacatcattttgataatttagatttgatgtttagtcaaatggcaaaataatgttcgtgatttaggtgtgaaatgtaacggcagccgtgcatattttccaggggcttttaatgaaaatacgaacattaagtatgaggtgaagagatttgatacatgtagattggttgaaaactatggcgagagacggattattttatggttcattcattgctgtaattgttttcttgctaaattggtttacgggttaggttttaaaggtcttccttcgcttttgaggttggagattggctggggtgtggggctagccccgcatagcgtaatgggtaaatagaataaaagaaaatataaaggtcggtagtacaagcgtttaggctcgtataatggataggcaagttgatagttaaatatattcacttttgagtttatcgacttggcgatgaagacaaacgagcctaaaaaagttatgcaagaatgtagcgtagcggaaaaggtggagattttatgaagcagagcgtaagaaaatactacctgtttcttgtttaaccttttagcaaatacagatagagggttgttttgatggagaatgttattgttacgttgtttggtactctagggatttgtttcttgtttaaaggcatgctagatactttaaaagaagggtgatatttgtggatttgcctgtttgtaatgaaaaagaggtaactgttttatctaagacattgaaatatttgagaagtgatcaatctaatcaagttaaggtacataaagagtatttagaggacagaggttggatttttgatgatttaacttatatagatagcaatatctatgtagtttataaaaaagaggttgtaaagcgaaataaggcgttttaaggggtgtatatatgtttaaaaagttttatcgtgaatatatccatgtattgtttaatattgttgcgatgtttttttattttagttggtgtttagttggtgctgaatttaatttattaactctaatagcaattggaattgccctttttatttttgttaagtatgtatctatggataagaaatttgttaatgaaaatatagataaattaaaagacaaaaagatgatttttaggaaatatgctataagtggtgaagatattggatatgcagtttttacaaattttttattgtttattttgtatttaggaatatccgtatattttaagcctttaagtgtaatggctttattatttgcttttattgttaatgttagttttcttatgttaactcttagaataatgagtagattaagtttaaagaatagtaaagtttaagaggtgtatatatgtttgctaagtattatagccaagatgatgaatttatgtcgccacttcaatttatagctttgggtggtattatgagttttcttattaaatttggttgtatttcgcctagtgtgaatatgttaacgttatttgttactttcgttacttgtattggattatgttatttttttctacttttaataacaaagtatttttatagatttcttgctaaacatcgtgataatttacatgtttatttatgtaataagtacaatgaaaaaatagcaaatagaatcggtttatgtattggtttagtttatattgtaggggtgttagttatatgtttgctgatttaaagttgaattttaaattttggttaactgtagtttttgatatatgtatgcttgcaatgatctgtgttgttacaacaaagtatgtatctgatatatatagtgatttgtttattttcacgacaggatttttaatactattaatttggtattctgttagagtgtatttgatagatttaatcagaaaaaaacctatcaataattaaaatttaatatttttttattgaaaaaccatatgtttttatttacaaaccatatggtttttgttatattaaatttagttaattgataggaggttgtttttatgacagttaaagaaaagaaaaaaacttgggcatttacatttactgaaagtgaaattcagataatagatgaaattgtagatatagagaatgatagaagacattcaattgctagagaacataatttaccgtttaaaaaatataatcgttctacatttgtgcttgcaatgattgaagaaaagaaacgtaagtatcaagagcaaggagaaatttaatggaaattgttttaggtgttagtgcgtttggtttgtatatttcgtttttaatatttttatattggatggcattagattttttagcttggttatataaaaagatttaataaaatcgttattttattggttttctcttaacttgttaatattaataggggataaacgctcacttttttatttctacttttgaggaggtggttttgtggtcggttcttctgatttatctcgcattgtttcctcgagtcttggccagtttattcttgtttgttgtactgattcttctgtccatctgggtctcctagttccttatgatttggctaagaaaacttctttttttacagttgacaatgacatgggattttcattggatgatttaggtgttcatagtgatcagatgttatttatttttacacttgaatctgtattgatatctattccttttgatcaagttgatagagttataacttttactggttcttgtatagatcattataataaattttatgtagaacctaatgaatttttgaatgaattcaaattatatatgtctgtttaattattttacttggaaaggtgtttgtttatggctttagacgtttctaagtgtggcaaaaagacagcacatctgaagtctaaagaaactggtaagcattatgctaaggctttgacttgtaataaattagaatgtcctagatgtcagccagtaattgccgcacatatacaaaagatggttcgtttttattctcaacgtgaacgtttgtttttctttaatactcttacttcgactgatggtattaaggatttggataagatttttagtaaaattagaaatgagttgaattttaattttactttggaaggatatatgaaacgtaagaaggttagttatgaaaaagctttgaaatggtatgagaagaagaaagaaaaaacaattctttctgatgttgaagtagaattgtttagaatttctcgttatgatgctgttatttctgttgctaagcgtaaaaaagtttattataagaatttaagttctgatgataaagctaagtttaaggatatatatagtgatttgatttatgaaaggtttctttgtatttatgattgtaagtgtaaagatcagtctttaagagatgaattatataataatatttctaagcgttttgtagaaaatgaatttgttgattttaaatttattagagttttagagtttcataagagtggacaacctcattatcactttttgagtaatcgttatgtacctcatactttattaaagaagcttactgttgaaggtgtgagtgaagtttatgataacacttatattgtagaagatgctttgaggaaaaatcctgatttaacttatgattctgttgatactgatattgtttctaattatgtttcgaaaatcactaattatgttacaaaggatacaatagatacttttttaactatgcaaggtgatggtgatatttctaaaaagcttattagttctagtaattctattaagatttttaaagagaaagatgaaaaggatttaaaatatattaaattgggtgtttttgattatcaattaaattctagtagttatgagattcctttaggttttgagaatagtgctgaagattttataagggtcaattcttatatgaatgctgatccacatgcagttaggttaagtcagcttgttaaggaattagatttgtctgatgaaattaagtatagctatatgattcacgaaagattattagctatatcttcagttgattttatgatagagagacttggtaattatcgtactgaaggtttaacttttgatcaagtaaggttacttaaatcatttattgataatcgtattaccttgcttttaggacgagctggaacgggtaagacatatactcttgttaatttattgaagcgtttgaatcctaatccaactaaaactattatttgtacttatactggaaaggcttctagtaggattagagagttattaagagagcaagatttagaaggttataaaccaatgactatacataaagcttgcgcttcgaattttagttctaatttttttagaaatgaacataacgtaattgattgcgcttatttgattattgatgaagtttctatgattccacgtgaaattttagcgaagttgttacaggctgttccgagtcatgtgaagattatttttgcgggtgatgatgcacaattacctcctgtgaatgatacaagtattattcctgaattagaggcgttagagtttgttaatactattcgtttaacacaagtatttagaagtggtgatgctgtccttaaacaggcttataatgtattagatcataaattgattaattatgacttgtatgatgaaaatatggaagagttggtgcagagacttgtttttgaaggctatcaaattttaactaatacaaggaaattagctaaagatataaatttgattgttcaagctaaaaagaaagatattacactttgttttaatgattttaagtatgatttgaatgatcgtgtcatgattattgctaatagttcagcaagaaatgttagtaatggtgatactggaagaattgtaaattatgatgatcaaggtgtttgtgttcggttggatctagaagatagagatgtattttacaaatatgaagatactgaagaaattgtaccggcttatgcatttacagttcataaatctcaaggtagcgagtatgagaatgttgcagtatttgtagatagtcagccgaaattgaatacaaataatttattgtacacagggattacaagagcgaagaaaagtataaaggtttatgttcctaatgaaatggttttaactaatatgattaatacagttcctgagcctgtatctaatgtgacactaaataatgtgtttgacgtagttcatggagttattaaaatggatgagaaaataaaaaaagaatcttctcattagaaaacaagaagattcgtgtgagttttcgaattgactagagacgaagactcataagactaaattgattgattgtacttgtattatacaaactttataaagaaacgtctagaattaaagtcagatttatatctgacttttttgtttgttgtatatgaaaaaaatcagaataaaatcagaaatgtatatgaataaaatatgatataattcagatatagactaaaaaaggagaatgattgattgtgaagattgttgaaattattgacttgattaatagttctatgactatgccagatatggctaaaaaattaggtgtaagtaaggatactttgcgtaggcgattaaattcagttgggtatgagtatgataattctaagaaaaaaactttatatgttggggaagagtcagaaaaaaatcagatagacaacagattgttttctgatttaaataagaaagataacagaaatgaattgaaagttatcagaaaaaaatcagcagaaatacagaatgaagaaaaacatgttgtaaatgaattcagaaatgagtcagaaaaaaatcagagtaaagaaaaagaagttttaaataaagttagaaaaaaatcagaaaaaaatcagaatgactttactgaatctgaaattttagctttgaaagatttattacatatagtaaaaagtgatgaggctaaattgtttttagagttggcttcacttcctgaatcaaaggaaagtaaaaagagtagtattgttattagtaaagaaatacatgaacaatttgaagagttctcaaaacagtttgcaggtaaaaggatttcaaagttttcattaattgaattagctttgtatgaatttatgaagaagtatagttgagagtttagactctcaactttttttatgttcggttttttatgagtccatttttgtttatagtagacatgatggtttttttagaaaaggagtaagaaaaaagtgggcagacatcgtattgatccagacgaaaaaaaggtgaaattaaatgtttctataaagaagaaatatgttgatttagtaaagcaacaagaaaatcaatctgaatttgtagaaaatgctattgtagaacatttaaaaaagcacaaaaagatttaaaaaattttttttaaaatttcttcttgtattctgtccctttttttgctataatcagaacgtaaaatctggactcgaaaatttgttcgtttttatgttcgcaaaattagaatatggaggtattataatgccaatagttaaaattgaaggcgtatttatgggcgcaagtatggttgaaaaagagtttgaagggaataaaaaaacaactgtagttgttgatttgtaccaaaaaggtgaaaaagggaatgagacggttagggtttctagtaaagaagtaacgttgttcccaacgatttctggtggctacaaattaggtgatgagtttaagtgtctagcatctgtaagtgcatataagaataatgcatattacaatttgcaacagattgttaagtagtacgaggacttataagactgaagtgattgtgtgattttatgttagataaaatcgatttaaacgacttgtacaaaactatttcggaaatcatgccaaactacttagtacagactaagaacggtagttttgcagttttccagacacttacctatggtgatatgttaattagtttcttgctattactaatcttgttggtgttaacattcaactggatttggagtgctttgcgatgattgaatttaatttagaaaatttattaaaccaatattctctatttggactcccatttttgttaatcattgttttcacattgcttaaagattggcggtttgataaatgaatgatttagcctttttagatatgatgtattggttttttatgaacaattcagttgtattatactcgttaggttttataacctttctagtattcgtaataatgatgttcaccaccgtcaaagcttggggtgatggctattagttttagcatggacgtgggaagaatcttgcagtatgccttcaacatgtttagttcagtgttaccagtgatttatttattcattggtggggcgtttgctatctactgtatcggtaaagtgtataacacgtttagaacttaggagttgataacaatgcctgaatttggtttcagaccatcgatgtctcaattattcggtaatttcaatatgaactggaatacaatgacgccattgttagttgttttgtttgggatactgtttggatttttcgtagcgcatttagtaaaagacaaatttgatgattgattaattaggaggaatttattttggaaatgccaaaaattacattgacttataatcttgcagacgttgctaacggtttgactaactggttaggagcatattggccaattatcgcattctctgtagcgattccattaacgttcttagtggcgtttaacactaaagacctatttactcgttaatcatcaaataatcactccttaaatagcaagaagttaactataaatttaataaaacaattaaatagctgggctaataacctagctatttttgttaggaaggattgatatgaaaaagctagccataatttttttatgtgcattttgtattgttagccatacgatccctgtgtttgctgattcacctagttttcaattggtaggtagtaaaaatgtaacaatcgaaaataatgggatagttaatggtaaatacaatttaattattaaagttaacaatatgaaagatgtatatagttttcagttatcggaattgatgcttgttaatgattgctcgttccatgttggtaaatcaaagtggactcgtccagaacaagaaaaaaacgagttccctattaactggaatcagaatggtacatacgcattttacatttttcataatggtaaagttttaggctatgcacgttttaagcttaaaggatttaaagaaaacggtggcggtggaggagaaactgtatattggggcaaaggtgctaaatactacgatttacctgaaattgaaaagcctaatcctgaggactatgcggattatgataataagaatgacggagtttgtacaaatgaaaaaattccagatgataaaccacaaggcagcggtgatatagatgaatcaaaagaagataataaaccacctgtagatggtggcggtggttctgataaagctgttaaagaagttttagaaaagattgttagtgcagtaaatgaaatttcaaagaatacaggtgaaacggctaaaaatacaggtgagacagcaaagaatacaggtgagattaaaaagaacaccgatgaaatagcaaagaacacaaaagaaattgcggatgctgttaaggatattagggataatttgaagattcctgacgatatggatttgtcgattaaacctgttctacctgaggacattaagcctgataaacctaaacaacctgataagccttttgaagacaaacaagagcactttaaagagggtgaacaagagaaaccacctgacaaacttcctgttgctcctgagcccgctgaatgttggggggatgtttgtaaagataaagataatcagaaagaagaagatatgaagaaagaaaaagatatggataaagaagaaccaatgaagcctgataaaccaatggaaaaggaagacatgaaaccagataagccaatgactcctgataagccaatggaaaaggaagacatgaagcctgatattagtttgtctagcatctaaaataaaaattgacgtttcacgttgtttgtttcgtttagttttcaaagttcaatatcgcgtttcagcgacttttataatttaacacttctcgttaaatctgtcaacagtttttttctttcgttgctgacgacgcttattaatttaccatattaatcatttaatagtcaacactttttaaaaaaatgccaaaataattttatcttggcatgatataaagcttaataatcactaatgctgccacacccggtaagcctaacaaactcgttattgctgctgtccccatgttaatcgggatatgaaaatcaaaatatgtccctacaacatttacgataaaaagcaatgctattcctaaagtaacatgaaaaatcaccttacctataaaacgtaatggcttagaggcaacaccaaaaacaagaaaaataaatactaaagtaagaatgccaacaataataattgtagaattcattttttcctccttatgaatgacctatacatctatttgtatgggacaagacaataaaaaagaacagttatcatatgcagcatctcttttatataaactaaataaaacgatacctcagcatttaacaaataaaataaaaaggcctgcttagaaagcagaaccttttaccattgttccatttttacaggacgacgctttgcttctttcaacaaaaagaaatatttcgcctctgctattttcaaagaacaaatgacatcttgagacggttctacactttgttcgaccattctcttctgacgtaaccactcattcttcactttttccaaaagtacaattaacttatcgtcatactctttacgcaatttaccctttttttgaaagaacattttcgtttctcctcttatacttctctgcgaccttctaacgctttggataatgtcacttcatctgcatattctaaatctccaccaactggcagaccatgtgcaatacgagttactttaatgcctgtaggttttaagaggcgggagatatacatcgctgtagcttccccttcaatattagggtttgttgctaatatcacttcttgtaccgtttcatcatgtagtcgctttaagagttgcgggatattaatgtcttccggtccaattccctccataggagaaatcgcaccacgtaacacatgatatacaccttgatactctttcattttttccatcgcgattacatctttcggttcttgtacgacacaaacaactgattgatctcgatgtgaatcattacaaatataacaaggatcacgatcagtaatatgtccgcatacagaacagtacgctaaatctcgcttcgcatttacaagtgctttcgcgaaacctaacacatcatcttctttcatatctaatacgaaaaatgccaatcgaaccgctgttttcggtccgatacctggcaacttcataaaactatcgattagttttgatattggttctggataatgcatgtatcaatatcctcctagaacattccacctggtaagtttaagccttttgtaaatttacccattgtagagtttgaaagctcatcagcctttttaagtgcatcatttgttgcagctaatactaagtcttgtagcatttcgatatcttctggatctacaacttcttctttaatcttcacttcaagaatttgcttgtgaccatttgcgataactgtaatcattccgccgccagctgtaccttcaactgttttttcaccaagctcttcttgtgctttcgccatgtccttttgcatcttttgcatttgtttcatcatgttattcatatttcccattccgccacgcatcataattaattcctcctaattattattactcttttatttcaatgagttcttgccctactaatttcactgcctcttctataagaggatcttcctttttctctgggctttcttcagactctccaccttcacgttgtaaaaagtcttcacggattttaccccattcactttttggaatggcaatcatatttaaccttttacttagcaattcaaataaagcttgttctactgtatccatagcttctcgattttcgctcgccatcttacagtgaatctcatattgaaatgctaaaacgtaagtgtcatctgaagctgccactggttcgctattttctagtaaaacagcaaacgctactttgttatatgatttgagtcttcctaacaactcaccccatacagcttttaattgttctaaatcttgacgcttcgcttgttttaatacttcatttacacgtccgacaggaatcttcatacttcctgttcttaccggctttggtgttgcacgtgtctctcttacttcctgttgtacaccagctggcacaccgttctttttaacttgctctaactctttctccagttgctgcatcctgttcataattgcttgcaaacgatctgtaccatttgcttgcatcataaactgttgacacaattgcaccataacaacttctaagaaaatacgcggatgatttgtccacttcatttcctgttgtcccttactaagggtatgaataatctcatagatcacttccggttgcatttcttcactcaacttacggaattgatcatctacaattactcgttccaacatatgttctagttgcggtgaagtttgatataaaagcatatcacgataatagtaaatgaaatcctccataaaacgaactggatccttccctttactcatcatttcatctatgatttgcaatgctcttgatacatcattttcacgtatgcattctactaaattgcctaagtattgctgagaaacagatcctgttacggccaatacatcttctgtcgtaacggtctcatcactataagatatagcctgatcaataagactaagtgcgtcacgcataccaccttcagcagcacgcgcaacaatttgtaatgcctcatcttccacttgcgtaccttcatttgtcacgaccgttgataatctctcaacaatatcattcactgatatttttcggaattcaaaacgctgacaacgtgaaataattgtaggcgggatcttatgaggttctgttgtcgccaaaataaagataacatgtcctggcggctcttctaaggtttttaaaagcgcattgaatgcacccatagaaagcatgtgaacttcatcaataatgtatactttatattctacagcacttggagcatattttactttatctctaatatctcgaatttcatctacaccgttatttgaagccgcatcaatttctaatacatctgaaatggatccttgtgtaattcctaaacaagaaggacattcattacaaggttcagctaccggagcatgttcacagttaattgcttttgcaaatacttttgcaattgtcgtttttcctgttcccctcgggccagaaaataaataagcatgtgaaactttctcttgaagaagggcattttgcaacgtttttgtcacgtgcttttgaccgactacatcttcgaacttttgcggtctccatgttcggtataacgcttggtatgacacgaaaatacggcctccctcaaaggttattatctcatttattataacccattctgtttatagattccaaaagttattttctatacaaaaaactcacctttgtattaaggtgagttttgtatacatatataactgccgtgcaccctccgtcgattacgtaccataagcgttactcaagcagttagctcggttcaggcactcctgcggcacacgagaagacccgcttattgctgcttccttccggacctgacaaggttcacggggtcccgttgcgcaggacccaaacgtcaacaccacttacttaaggcagaccttacagcaacataacctcgagaggggattcggcctcgctagagcggattgcgagtatagggcaccgctacctccccgcttagcacggcaaagttaaaaccaatattcggttgccttcattaaaggcattatcagtataacttgtttctttataaaatgcaaatacgttagttcccagtattcttctctaatttttttattgcttttctttttttacgaagctctctaaaaaagcttgttaacaacgtaccgcattcttcctctaatacaccagatactacttcacattgatgattgaagcgttcatccgttaaaagattcatcaatgtccctgcacatccgcccttcggatcacttgcaccatatacaactcgcttcactcgtgataaaacaattccacctgcacacattggacaaggttctaatgttacatacagtgttgcatcttctaaacgccatgtccctaattttttacacgcctcatctatcgctagcaactcagcatgagctattgatctctgctcagtttcccttaaattatgggcaacactaattacctcaccatctaacactataactgctccaattggtacttcctgtatttcctctgcctttttagcttcttctatcgctaattgcataaaataaatatcttgatcttgttccataacatagtcctttcattacaaataaagtacacttatttccatttactacacaggggataacttttacaaattcaatccaccctaaaagaaaaaagagaggggattacatatgaaaaataccgccttgctcattatcgatatgattaatgactttcaattttcccacggacccattctagctaaaaaatgtgaaattataacaaaccctattttacaattaaagaaaaaaatgaaatccttcggctgtcctataatttacgttaatgaccattatcaactgtggagatctgatatcgaccaacttattactcattgtacaaatgaatatagcgaaaacataatccataagattgctccaagttctgatgattacatttttattaaaccacattattccgctttttatgaaacacctttaaattcattactaggttatttaaaaatagaaaatctaatattaacaggggttgccggaaatatatgtatcctatttacagctaatgatgctcatatgagaaattatacattgtatgtaccagaggattgtatcgcctctaacaacgaccaagataatatacatgctttaaaaataatggaaactacattgaaagcaactataacatcatcaaccaaaataaaatttaattaatacatatatctattttctaactttttatatcaaattaacccgctcgcttccctcttgtgctacaataattctgttttgtgtttttagtagtcacggtaaatcactgattgaaaggaggaaacagcgtgaccggagtaccatttatcacggttgaaggaccaattggtgttggaaaaacttcacttgcgaaggaaatttcaactcacatgcaactccacttactaaaagagattgttgatgaaaatccctttttaggaaagttctatgaagacatcgacgaatggagttttcaaacagagatgttctttctttgtaatagatacaaacaattagaagacattaacataaagtatttgaatcaaaggaaaccagtagtagcggattaccatatctttaaaaatttaatttttgcatcccgcacattaaaagactcccaatatgacaaatacatgcaaatttatcgtatccttacacaagatatgcctgtgccaaatgtcattgtttatttaacagctagcctagaaacattgcaaaaacgaatcgccatgcgcggaagagaatttgaaaaaaacatggatccaaattacttactacagctcacaaaagattatgaaacagcaatggatgcttttaaaaaagatcatccggaaataccagtattgaaatttaatggagacgatatggattttgtaaaaaatcctgatgatttaaacgtcatcctatctgcccttcaaaatactctcttaaaggagtcgaaataataatgaatttaaggcaaaaatatgatatacccaatgacgcagtaatcactatcgccggaacggtaggtgtgggtaaatcaactatgacaactgcattagctaatgctttaggttatcgcacatcatttgaaaaagtagattccaatccatatttggacaagttctatgcggacttcactcgttggagcttccacctacaagtgtactttttagcagaacgatttaaggaacaaaaaagaatttttgaatatggtggcagttttgttcaagatcgttccatttacgaagacactggaattttcgcaaagatgcatcatgaaaaaggaacaatgacggaaactgattatgaaacatacaaaggtttatttgacgctatggtcatgactccttacttccgtcatccagacttattaatttacttagaaggttctttcgatgatattgtcgatcgtattcaagaacgcgggcgcccaatggaacagcaaacaccaattgagtactggaaagaaatgcatggacgttatgaaaactggattaacaactttaattcatgccctgtattacgcttaaatattaatgagtacgatattttaaaagatggtgattcaatcgaaccaatcattaaaaaaattggccattttttaaaacaaacacgtaaacttgtaaaataaaaaacccgtgcatatgcacgggttttcctattaaattacttcttctttgttggagcaataatttcactctcaggttttcctgcgttaatgcgctgacgaaccgtacttgtactaatatcgtatgcttcagcaatctctttaacagtcatttctttcccgttaattactgccgttaatactttacctgtacgttttggagccgccgctttctttacagctgcttttttaacttgttttggcgcctctactttactcgtagcttgttttacatcacaagtacaaccacaaagtttacggaatgtatcatcactaataatgcgtgatacgtttgcaccactgtttaaaattctattgttcttacagacaggacattgtacataatataaagtttttccatctaaaggaaacgtttgtataataagatccatgttgactcctttcatatctatgaagataatcatcggaatatgagtgtgtaataaggacaaaattaccttacaccatactttatgattggttttaaaataaaaactcgttacgtgttggtaacgagttctccaatctccacttatatgcgctgttgtcaattatatctggaggaggtagagggattcgaacccccgcgcgactctcgccgcctgtcggttttcaagaccgatcccttcagccagacttgggtatacctccatattgacatcaaatataatatcaaaagaaaaacagttagtcaaccctactaaaataaattatgaggaaaggaaaattttacttttcccttcctacattacagtactgacaacgctcataattaccaatcactcataccgatgaatgtttaaatttacttaataactgtttttcctcccatataagggcgaagaacttctggaattataattgtaccatcttcttgttggtagttctctaaaatagctgcaaccgtacgtccgatcgcaagaccagatccatttaatgtatgaacatgttctggttttccatttggctcacggcggaaacggatatttgcacgtctcgcttggaaagcttcaaaattactacaagaagaaatttcacgatatgtgccatagcttggaatccatacttcaatatcgtatttcttcgctgctgtaaatcctaaatcgcctgtgcacatgctcataacgcgatatggcaactctaataattgtaacacgcgttctgcatcatttgttaatttttctaattcttcataagaatcttctggttttacgaacttcacaagctctactttattgaactgatgctggcgaattaaaccacgtgtatcacgaccagctgaacctgcttcagaacggaagcaagagctaaatgcagcatatcttataggcaattgctctttatttaaaatctcatcacgatgcatattcgttacaggtacttcagctgttggaattaagaagtaatcttcactttcaatacggaatgcatcttcttcaaactttggaagttgtcctgttcccgtcatacttgcacggtttaccatatatggaggtaatacttcttcatatccatgctcatcagtatgaagatcaagcataaagctaattaaagcacgctctaatcttgcaccagcacctttgtaaaatacgaagcggcttcctgttactttcccagcgcgttcaaaatctaaaattcctaaatcagtagcaagatcccaatgtggttttggctcaaaagtaaattctttcacttctccccaagtacgtgctactacattatcatcctctgtttcaccaactggagcagattcatgagggatatttggaatagataacattaatctttctaagtcttcttcaactgtacgaagttcgttatcaagatcctttactttttctccaacctcacgcatttctaaaattagagcctctgcatctttcttttcgcgctttaatacagaaatttgttgagatacttcgttacgtttactttttaattcttctgtctgaacaagtagttctcttcttctcgtatcaagttcttcaaaacggccgaaatcagttaaatcttcgcctctatgctgtaatttcgcttttacttcttcaaagtttgtacgtaaaaatttaatatcaagcattatatactcctccttttattttataaaacacaaaaaactcccgtccctatataaagggacgggagttaacccgcgttgccaccctagttgaaagcattaccgctttcctctcaagtagaaataacggctcttcaccgggaatgcttactaatccaaaagatattccacattccattccaggatggattcacaaactgtttctatcgatttccaccaaccatcgactctctataagaaacgacatttgttactatttcctatcaacacgcttattttataaaattgttaccatcaatttactataatcttatacaagttgcaagttacttatacaacttttttcattttcgcttcttttaccatttcaacaaagtatgctgtcacacgatgatcatctgttaattccggatggaatgaagcagctaaaaactgatcttgtcttaccgctaccattcggtcaccatgcttagaaagcacttcaacattatcagctacttctacaacatacggcgcacggataaatacaccaatgaagtcttcacccacgccttcaattgaaagcgcagcttcaaaactatccttttggcgtccgaacgcattgcgctcaactgtaatatccatagcaccaatatgtgctttttcatagccaataagtgttttcgcaagaagaatcatccctgcacatgtaccaaacattggtttaccagactttgcaaatgtacgaagtggttccatgaaagcatacttatcaataagacggcgcattgttgtactttcaccgcctggtaaaataagaccatcaatctcttcaagttgctctatacgctttacaacaacagcttctgcaccacttgcttcaactgattttacatgctcacgaactgcaccttgaagacctagtacaccgattttcaccattttaaagttctcctttaattaccatccacgctcttgcatgcgttgttctggtaataacgttgaaatttcgacacccttcattgcattacctaatcctttagaaaggcttgcaattagttcgtaatcttcataatgagtcgttgcttcaacgattgcacgtgcaaatttctctgggttttctgatttgaagataccagatccaacaaataccccatcagcaccaagttgcatcattaatgctgcatctgctggtgttgctacaccacctgccgcaaagtttacaactggtaagcgaccaagacgtttaatttcaagtaatacttcgtaaggagcgccagtattttttgcatatgtcattaactcatcttcacgtagactcgcaacttgacggatttctgcattgacttggcgcatatgacgcactgcctctacaatgtttcctgttcctggttcaccttttgtacgaagcatagatgcaccttctgcaatacgacgtgcagcttctccgatatcacggcaaccacatacaaatggaactgtgtaatcacgtttatttaaatggtatacttcatcagcaggagttaatacttcactctcatcgatatagtctacccctaatgattctaatacacgtgcttctacaaggtgaccgatacggcattttgccataaccggaattgacaccgcacccataacttcttcaacaattgttgggtctgccatacgagaaacgccacctgctgcacgaatatctgctggtacacgctctaatgccataacggcaactgcgcctgcctcttctgcaatttttgcttgttcagcgttaactacgtccataataacgccgcctttttgcatttctgccattccacgttttacacgttctgtccctgttacatttgtcatgtacaaaaacccccctaggtgaattgctttcccccgttaaaggcgaaaattaagaatactcttacattctaccactaactatcagatgcttgtctactactttttcataaagtcggtatgaaaaataggaataaaaaaaagctcctatcatgaggagcttttaaaaccaaccttttactgtatcaacagcactattccacatgccactaaagaatgaaccaattccgcgcatagcacgagtaaaccagtttgcttcttctacttcagatgttgttacaagatccacttgcagtgacttaccagttaaaaatccagggtcgtttgtatcttttggcgtaattaccatttgaccaagcgcagctccctttttaataggtgcttcttgtcccttgcttgattcttttaattccgttttataaacatctttacttccttttggcactggaagtgaaatagcttgtttcgtttgaactgctacatctttatctttcgcattttctactcgtactgtttcttgtccttttactgaagaaccttttttatacatttgttttacttcaaagttagcaaatccataatcatatagcttctttgtttcatcaaaacgtgctgtatgagaacttgttttaataactacagaaataaaacgcattccgtttctttcaaccgtaccagtgaagcaatctcctgcctctggagttgagcctgtttttaggccgtctacgccatcatattctttaactaagccctttaacatccagttccagttcgacattgcaaacttctctttttctggacggaattcttttttagggatttttgctgtatctaacacttttggataatctttaattaaatgttgtgctaaagttgcaacatcctttgcagacattttattttcttcatccgctgttgttccttcaggatgcattccctttaaatctttattcgttaaacctgtagaattgacaaatttataatttttcaaccctagttctttcgatttatcattcatcatttttacgaagtctacttctttacctgcaattgcttctgctaatgcaattgttgcaccatttgcagaaaagattgccattgcctcgtataactcttttactgtataagagccaccattttctaatgcaacatttgataatgaagcatcttgtgaaaccttatatgcatattcagaaaccttaattttctggtcccacttaagttttcctttatccactgcttcgtgaactaaatattcactcatcatctttgtcatactagcaatggataataattcatctgcattcttttgatataaaattttcccagaattcgcttctactaaaattgccgcacctgcttcaatgtttaaagcggctcctgtttcagctgatgcattgctatatggcataaaaatgctacaagctagtgtaagcactgttaccaaagcaatgaatcttttgcaaaacatacctttcacttttgctacccccaatatctatgtactcacataaccgttattctaacataatcaaaaaaaaatagacagagatatcaaatctctgtctatttgtatataagacattataatgagtagtttggagcctcttttgtaatttgtacgtgatgaggatgactttcacgtaagccagcacctgacatacgaatgaattgtgcattttcgcgtaagaattctaaatcctgtgctccgcaatatcccatacctgcacgtaagccaccaactaattggtgaactgtatctgctaaaggtcctttatatggtactcgtccttcaataccttctgggacaagttttttattgccttcttggaagtaacgatctttacttcctttttccatcgcaccgacagaacccataccacgatacactttaaattgacgaccttggtaaatttcagtttctccagggctttctgcaacacctgcaaacatgctacctagcataacaacatgtgctcctgccgctaaagctttcaccatatcaccagagtacttaataccgccatcagcaataactggaatgccgtgtttacgagcttctgttgcacaatcataaaccgcagttaattgtggtacaccaacaccggctacaacgcgtgttgtacaaatagaacctggtccaataccaactttaactacgtttgcaccagcttcaattagtgctttcgttgcttcagcagtagcaacatttccagcgataatatttagtgatggatatttagcacgaacttcttttaccttatcaataacacctttagaatgcccatgtgctgtatcaagtacaattgcatctacactagcttttactaatgcatcgatgcgaagcatagcatccgctgttacaccaactgctgctccaactaataagcgtccttgcttatctttagcagagtttgggaattcaattactttttcaatatcttttattgtaataagcccttgtaatacaccgttattatcaacaagagggagtttttcaattttatacttttgtaggatcttttcagcttcttccagtgtagtaccaactggagctgtaattaattgttcttttgtcattacgtcagaaattttgattgagtagtcttggatgaagcgcatatcacggtttgtaataataccaactaattttcgctcatctaaattatttacaaccggtacacctgagatacgatattttcccataagatgttctgcatcatatacttgatgttctggagttaagaagaaaggatctgaaataacgccgctttcagagcgctttactttatcaacttgctctgcttgttgctcaatagacatattcttatgaataattcctaaaccaccctggcgagccattgcaatagccatgtcagcttctgttactgtatccattcctgcactaattaacgggatatttagctgtaagctttcagataaaactgttttaacacttacttctcttggtaatatatctgacctagctggtacaagtaatacatcatcaaaagtcaaaccttctttaacaaatttagattcccacataattgttccccctatgataccagaaattattattagtagcttatcaattggttaaaatactgtcaaggacgtatatatatgttagaatttttagacaataaaaggagcgtaatatatgcatcaaacatcttgtacttggcagcagttaagtttctttttttcatctcaaaacgtacaacgttatcttgcccgttgttacgaaaaatcctctattcaggatgccgaaaaaaaaagttttgaaaattgttatccctttatttattacttagaacacgggaaaaattattatgaattatataagacagctccattttccattcaaccaatgttgttattttatggaattagtcaactttttaaagcatgcctactaactattgaccctaactatcctgaatccactactgttttagctcatggcgttacaactcgcaaacgaaaaaaacaagggtatcaatttttagaagatgaggtgaaggtacaaaaaaacggattatttactcatgttgcagaacaactgtttcacatgaaacacttagaagcagaaaaatttaacatgttagaattaatgggaaatattccagaattacaaaatttatttcgttatagtcaaaaaggatcaactttatataaaatcgattcaacaattaaaaatgagctctccttttcagtcaacctactagatcgattacatatgactaaagagagattttctcgttacattgaaacatcttgtaagcatttatcaatacagcacgtacctgagaagactaatgaatcgaatttactttttacggcgcccgttcaatcatggaatcctatgtacagtactcctttatactatgaacatcttactaatacttattatttgccacttacgactgatcctagaaatcctaagccaatattacctgaactcctcattcattatttattgctctataatttaagcatgatttctaggtatgaaacagattggtggtatgacttacttggcagttatggttctgaagattatccatttatttatcaatttctaagtatttctgctcaaaaaatcccttactatatttcaaattttttattaatggaaccaaatctatttcatgggaaataaaaaaacacaagtcaaatgacttgtgtttttagttgcttggcgacgtcctactctcacagggacaaggtcccaactaccatcggcgctagagagcttaacttccgtgttcggtatgggaacgggtgtgacctctctgccatcattttttaactctgattttcttagcgtggtttttttccgaaatgctggcggtacccctagaagaaagtacaaactctggaatacacatttttataaaagattttcttagacatgatcctgagaataaagagttactaaaaatcctcaatactggacggagtaaaaaaattagtgtaactattatggaatattcttataaagaatgtattgaagtggttaagaattgtttttcaaaaatattcgtatttggaattatggatataggcgatgcagagtactttagtaaagcatctaataacctcgttacatccgtagaaatgatgtatatgcctgataataaagcgttagttttattatcaaataaacctccaaagattgttgaaaaagcaatggcttataaaatgtaaagagtataagattttttattattaacatacaagtaaaagagagatagcaaatgctatcttttttttatgtgagtcactatataataggtaaatcagctaaataatttaatttataaaaactgaaaattatgtatattttttagaaatatttataataaacttacttaattttgtttttgttactatgtagtaaagggatgagatgaggagggattttatgtatacagcaaccagtaatgagaaggttatggaattgttaaatacttggtatatagaaatgagagctagacgtataggcaatgcccaacgtctaaaagagaaaatagatattaaaattcaaaaattaaaaaatgaaaaagaagaagcgttacaagatcaaaatttattgttgtattattctttattggatttccgatacaactacttaatagacaatttaggtatatcaaaagatagttttgaaaaaattaattcttttgaagctccaggagataactttctagcatattattataacttctttaaaggcattcactcaaacgaattaggaaattatattgaagcaaaagaacactatgaaaaagctgaaacttttttagaatatgttccagacgaattagagaaagcagaattttattataaattagcaacatatcattatgatatccagcaagctcttttatctattaaatatgcaactaaagctaaagatatgtatattcactattcaggatacgaaataaatgttgccttttgtgacaatattttaggtctatcttgtacatatcttaaagagtgggaacttgctgaagaacattatactgctgctatgagtcaatttcaaaagattggtgaagaaaagtttattataatgatccgacacaacttaggctggatgtatgcgactcaaaacctatcagtcttagctattcgttacctatctgaagttgtcgaaaagtcccctaaacattataaagcaatatatgttaaggcaaaggagcactttaaattaaatcaaacagagttagcaagtgtattaatagaaaaaggcctagaaatttgtaatgatttacaccaggaagaatataaaaatcgtaatttaattttaagagaaatgaacaataattcacctgctgaacaattcgaacgggtagcattggaagggattaaatattttgaaagagaagaactatattataatgtccaggaatattatgaagcgctagcaaccaaattttatgaagaagacggacattctaaagcgagtaagtattttcatttgggtttacaggctagaaagaaagcatttgataaggaggcattaaaatgaagaaaacattaattggtttaatgggaatcgttacgattttaacttttacaataggtctatctaatccaggagaggttcaaaagtttattcagactaaggttgctgcatccgaaggcgactatggaggataataatttttcagagagaaaggaaatgactttattgctacttaattagggctcatggcacgggatgtacggcagctgcctacattccgtaagccaccgctccacctttactcaactcgataactacagattgtagaaaaaagattagctggcagctgcagctaatcttttttacaatctgtacgttcctgagtttcgcttaacaaggtggacggagcgtaaaacccgaaaaacaaaacctaaaccccttaaaggaagccaggctagtgcctggcaaaaaaagtacctggtatagcaagcccattcccacctgactttgaacgtgtgggacccccgaacccttcacgctcaaaatctaggtggggagctcatctgtcaagggcaagacaagaagcggaatagcccaactcttactgcttttgagtttcgtatgacctactcgtcatgcttcctcgtatcccaactcaactaacaaaagactagtaatcgtatagcctctcccacttcccttgacagacgagctctgggcttgctgttaagcttcgcaccccgtcgggaaaaataattcccaacgggaaggataataccaggtatttttttaaaagaaaaaacaaataccccattgggctatttgcccaataacaaacaaacgttagcctattggatcgttaataggattaaacaatagtagatacagcttgtttatagataagttgttgttttccattaacgatcataaggatagtaaatttgtctacacctacaattcgtcctgtcatacgcacaccactaattaaaaacagtgtaatttctttttttgctaattttaattgctcatataattcattttgaatatctttcatttcagtattatatcccccattctagtaatatttacaatataaataaaattctatcgtttaattcttactatggccactaagaattaaaacatgaaatattaaactgaatcatttttgtgttattatttatcgtttttatataaaaacgataaataatactgtattttttgaggggtaatatgctataattatatatgtaagggaaagagaaaaattgaaaggattgaataactatgaatgaattatcaattgttaaagaaacaaatcttattattttagaatcaccaaaaagatatgtgaaagcatttgaggaagaagctacaactaaagtggattcaaataatatggatcttacaaaaaaccagtataaatgttttttaaatgctgttacaagtttaacatttttattaggtgaagcactgacacaagaacaaaaggataaaattattaaaacaaggcagggcataattaatatagcaggggaattaggttataaccgccatgagatagttagatcatcattattttatagtgaaaataaagcactttttaaaagtgtattatagtttacctctaacatataccaaaccgatataacggaagacagaaatgaatatattcgttgttgcaatttcatacaatcttagtgttagtcaaaaaggaaggaaagtatatgcggaagtatttactacatttaaagaagcttttgattatgctaaagatgaaatctttgatttacaagataaagggatcgaggttgattatagagaggttataaatgatgagttaaaagaaagagaacataatttatcatttttagtacaagaactaaatggaacagattttatacaagttacgattagacctaaaaagatatagataaatatagagataaaaaataacaaacaaaataacaaatcattaagaaaaaaagaggccatatatatgaaccaaataaacgtagcatttaaacgtagagctgttacagcaacagtagaaattcgccataatgatttttatgtagaattcgaacatttagcgggatatctgtacatttgtaaatttgaaagagaaatagtatatgtgaaaaataaacaaaatggtggagtagttaattcatattcaaagtcaaatgaagtgaaaatatataagggatacattaagtattcagctgataatccatttggagcgattcccactattgaagaaatattgaagaaatgtgacctgggtacaataagaatagcaagaaattatgtagaggcttattatgtgggccataatgaacagttagaacatttatatccaattataaaaaacgatttatctgtatataagggtgtttttgttgatgggttatcagttagagaagtgatagaacaaacagattttgatatgttaaaggattttaagatgtttaaagtagaacgtgtttgggatgcaatagaacctcatttaatgaaaattgaagatatgttctttacagaaatatacacattctttaaagggaatttttttaaagtgaattatagagatatttgtacgaagttcttttcataatagaatccctccttctttaagaagggggataaaaggagaaaataagatgaaaaagtttatatatattacaagtattttaataggcggcttattaggtagctatatatcactaacttatgcaaaggatgcaactttatttgaaaaagcaggaatgtatttccttatttttcctaccattataaatagttgtacaaaattattccataaagcaattactggaaaaggagaaaaaaatgaaacattatttgttcctacggtacattgtgccatttgttggacaacactattgttctatatcaatataaaattgaatttccattttgttttaacattagttctaatagtaaatataatcgtttgggtaattctaacaattacagtatggaagcgtaagcaagaaaagttaattgcaataaaataaaagaaaatcaaaaatctttgactttaagatataccaaatagatataataagaagttgtaatttaaaaaatggaggactttttatgagaaaagtaaaagttatagtaaatacactagaaggagaagctgggagaattgcttttaaagatgttgggtgcgccaatacttttattatggtaatgaacaaagaagctttaaaaaccaatcaattaaatttcaaaattgaagttaaattggttttacaagaagaagattcacaaaaaattcttgaattattttataaagttaatgaaaataatgatgattcgccgattcaggatgaactaataagaagctatatacaaatcaagaatgaaatgcaagaagaaaaggattcacaaaaaattaaggaactagaagaactacttaaaaagtataagtctattataagagagctaatccctaatattttataaataataatttgaatatcattatataaatctaaaaagctcttataatatacaaattttaaaatgtcaacatattagaaacctgttagaatggccaactggagaacaaattatatctttgagatccagttggttgcaacaggaaataaaaatactaaatactatgaaaggtgtaatgaatatgggggattttttaattggtttgtttagtcttatagttatattaatcttattactcttattttacataggaatacgttacacaaagatagtgggaattgtatttggagcttttccacttacattgtttttcttatttttattatataaatttttagaaactacaggtcagcttgttaatgaaatatataataatgcaggtgttaaaggaattataataggagtctttggtttttgttttatactaggcatagttggattgatagttaatgctaatgaaaaacaaatacgtaaagaagaattttgattataaatttatttatatggattaagggttatataaatataaaaaagggtgtgttttgatggataagatacatgaagtagaaatgttggaaaagaagaggaaatcaagccttagacaaacgatccttactatagcattagtacttatattgggaatagttatagaatatttttctttttttgctgatttatttgggcttatgggaatagaagtttttttaaaattccttttacaaattatatttttggggttaggaatgattagtgtttgtaactttcttatacttcttacaataattcatcaacttgataaaaaaagggacgatattaaatcaagtaaaactttattataaataataatttatacgccaggaaagaagcggctcaataggagccgcttctttttatttgaaaggttggcatcgagccaatttaaaaatgaaaaacacggatgcaccgtgtttttatcaaagtagcaagctaaagcttgctaaataaagcagatagtcaaaggaaatttgttgagtaactaagtggattgaaaataagggcccaaacatgggtttagagattaattatatcttttctgtactttttatttaaatggattccgaaatgtgataaagggagagataggagccttaaattgcgtttttaaactaattgttagagtggaacaaaaattaatgggctactcgcccaaacccagccaacggtagcccgttggatagctgtttattatccccccagcccccgttacatcgggggagctaccctcgccggtaggcaggccaaaacgaaaggttttggcaatgccaagagggtattggtgtagtgaaattgtcaactccttatcctccctcccgtcgctttgctatggtcagtccggtaccgttgacaatgctctagtgtacatgtcttatctttgtatagcttgtcaccatgtttattaaacatatccttaaagaattttcaaataagatatatcaagtcaactagtttataagctagtttgttttgaaatggtggaatatgttcgagaacgtgttctaccatttttaatagctgttctttagaagaacgtaagttgttcgctactcaaatgctagtggtttcttttaacttgaaaatagttatatgcttttgtattatttattgtttattcataaaaacgataaataatacatatattttattgaataacatataccaatgtgatataattatatgtgtaaggaagagaatttaaaggttctaaagtcaattgaaatataaaaatcagtatatcattataatgggatggtgaatttaagtgaagtatccaatatgtccgtattgtgcaagtgaacaaaaaataagaaatggagttctactaccaaaatgtgatttttgtggtgcggatcttagagataaaaatacaggttgtcttcgcctagtaagtgataagggagaaaggtttaactttcaaaaaatgaaaactaatattttcgaagagcatgcgatgcaatcagtagaaatattaaaaacatatcatagttttgatttatacattttattaaaagagataagagaaaaaagagaacttttatatatggggtatgagatatttttaaaagcagcaaagcaggacattgaatttgaaaaaaatgctgaaaaagagttacttgtttttaatgactggactaggcgaatgtatgtaattgaaaatattttaatagaaagacaaggttattttccttctaatataactgataaagtccttcaatacatgtgggatcaaatgaaacattctaaacaaaataagatgattgtacataaaaataattgtaatgaacctaatcatataaatactgattgtgtttagaaataaataaaaaacattattttaatatataagaatcaaaaaatgttaaaacgataaataaataataaaggagaaattctaatgacagtgcttcaaaatcaaatgaaacaaaaattaataactgaggaaaatatagatatgctaaaaattttagcgcatccggtaagactacaaatagtcgatgttttaatgcgacataaaaaatgtaatgtaacacaattagtggagttattacatatcccgcaatcaacggtatcacaacatctatcaaaaatgaggggaaaggtgttaggatctgatagaaaaggactggaagtttactattttgttactaatgtaactgcacaaaatatagttcgaactttatgtgaaaaaaaggagcatgggggaaaatgaattgtagatattgcaatacatatatagatattaatttatgtggtacatgttctttttgtaagcacaattttatagaatgtacaataggtcctaaaaaaataaaaagatatgtagatgaaaatgatgctgtacagcctatagaggtattaagaaagtatcatacatacgatctaatagtatgtttaaaaattatgcgaaaaaagaaatcagattcatattcatcgttagttcaagctaatcatgatacggatagtacaaaacatgtaattaaagaaaaaaaggaattatatagattttggaaaaagagaacttggataattgaaaatttacttatagaaatacaaggctattttcctgaaagaattactgataaatatttaaatgaactatatagccaatgttttaagtcaagtcagaaaagaagtagggaattgttgtctagatgtgtatccttgtagtttcagtaattatagaaggtgaatataatgaataaattaacatataaagcaattttaaagaaatataatcctgaaacaaacaaagcaggtcgagaggttcgttcaattacatttttcgccaaagatattaaagaagcatggaataaagcttctgatgaatttgaaaaagaaagagaaagtaatgatactattgaggttaagttgatatagtattgtcttcagtttgttattatgctactatgattgatggtttaagctttttttcttatagtttgttattttatcctggattaaaacatccaggaattttttttaacatttaactggatagatttggcaaaaagaggtggtatcaaatgaaaacacaaatgtcatttaatatttatattgatcaaataaatgattttacggaaattgttcctgagactttacgggcacatacaatctgtaagtttttaaaaaaggagtatattccttctaaaatagttaacgcatttgaaggtgaaggtgaagcttatcaaataagaatggataaacgcagtattaataaattagatgaaatggtcaaaatagcaaatgaaagcggattaaacgctaaaaaagacgtgaatcgatcagctattatgagagatgtgtttgaacaattcatcaataaatatagacatataaaatttccaaagccagaacgaaaaaggacgttgctgcacgttgaagctggcacaataaataatttagctaaatatatagatagttatgaaagaaataaaactatagaagagtttattgtacaggaatacagtggcccacatataacagctaaagaattaaagaaacgattacgtactgaatcagaattaattcctattaccttggatgcaacaacctttttaatcttggatgaaattgcagaggaatttggggaaaatgttaaacgtgcacacattttaagagatgcaataaaccaattatcacaaggatttaatgcatctctaaatatgtaagtgtaggtcaaataaatgttctatataaaataatatccaggtttattacatctgaataagcgataaccaattaaaaattttagaggggggggattaattcccctaatccacttaatctattttaatccaacctttttttaatgcttttaaaacggcattaagtctatcttttacttctaatttttttagtatacttgaaacatgattttttattgttttatcacttagttcaaatgtttccgttaattgttgattagaataccctttacctagtccttctaaaatgtcccactctttattagttagtaaaccatcaggtcttccagtgttatgctcgtaaatttttaagcgatctaaattatcttttgtattatctaacttcgaagaagtaaaatcagtgtggaagaaggcaactcctggatcttcaatagtttctagtacacacattaatttattaatctcaatatttttaagcaaataaacgtctatatcatattcatccattgcactaaatacatcttcttgtaggcttttgtttgataatgcaattatttttaatgagtaattatcctttaaactagatagtaaaaagtttcttccttcaatcgtttcgtagtctataagtaatatatgtgatacattatctagtcctttttctagtaaagtagattctaattcattataagtagatacatcctggatttttcgatctaacttggcttctaatatttgttttagcccagccctgtatattggttgatcactccaaatgataatattactgttataaggaatgtttgtaggttccatatccttatatccctccttttatgcttttaaataacaatagaaaagttattagacccatataaatattaacacgttttgagtggaatttaattttttgaatattgaaaaagaataaaactgaattagtactatattctattcgtacaactataatcctataatagtaataagataaaaaatactgagattttgtggaaaatgcaagaataaagagttttgaaaggatataagtaggtatatgggggtattttgatgaaaaacaactaaatttggagggatagtcgatttatttaataggtaaaaataactatataaaaagatgttatggtagttaaaaagttctattttaggtataatggtgaagtatacgtattgtaatttagatgatattttagtattattagtatcgaagataaatattctaccaatttatttcccgaattggttgtttatatttaaaataaagataataaatacatatataaataaaaaaatataaaaaaagacaaataaaaaaggatgatgtttcccgcatcatccatcatagtagtgagcaaccccgctaaaagtcgagcactacaattcgcatatttacatcatcataatatcatgttttattttgtgtgtaaagtatatttaaaatatgattctataattttttgcgaataaagtgtattctaaatattagatattcgaaggctatcgagtgttgtttactgctgtaaaaaaagcagagaacaacacttttttgttgttccaaaaggagtagaaatttaatggaacaagttaaacatattttagagcctataacagagtacacatcgcttgatgtaatgcgttttatggttcatggtgcattatatgaaaaatcacctaaaaattggacaatggatgatagaaagagagaaatgcaacgtgaaagattaagagaggttggagttgttcatgtaactactggaaaagagcaactttctacgggacaaagtattgtggtaagtagctttgagacattagaacgcttaaacaatcatttgacacactggacaccacaagtctatatgtggggaaaggctaataatgaagggcgtaattttgaaaacattcgtttcattacatgtgttggagtagaaatagataaaaaaattagtcttgaagaaattcattatgcagcagcagtaaataacttgccatccccaagtgttattctttcaacaccacgaggattgcaatggttttatgtattctctacaccatttttgacagaaaaaggccgtaaggcaggtcgttttgtttctgaagaaattaaaagagcctttgtaaatgtcatggatgctagtgaagtagaagaaggaactacaaagcctatatttgaattagaagcggatcttggggcttattcgctagggtattttagaattccacgagaagataatgtcctttactttaatggacaagcattgaactcagaatgggctttagcatgggctaaagaacaatctaggaagcataaaagaccagcggttgctaatacttcttcaagtagaatgtataaaaaggttggcatcatggaagatccagcaattcaaagtattatcaataacgtatttttacgtggctgtaaaggcaagctaggccgtaataatgctgtatttattttatctttagctatgaaatatgaaggtaaaacagaaagtgaaatcattgacaaaatagatgaatggaattctcaaataaaatcaccattaaagcatactgagattttacgtactgttagaagtgccatgaatgataaatataatgcgcctaaaaaggattatgtagaagaactggctgaaatgagaatggaatttgtctttgatatccgtacaccagcaaaggaacgcttagaccgtcagcaaagccattattcagaatgggagcaagatattatagagatggtagagcagcaatgcacgtctgatgcaccttatttatgcggctctctacgtgctttagcgcaaaaaattggtgaagagtcaccagtaggtaaagcaatgaataaatctagcttatccgatgtattaaaggtttctaaaaaattaattgtaaagactaatggaaaaaagggcagaaatgctcgtacatatattacaacaagaagtgtattactgaaatccaataaacataactttaaagcctttttattagggaaattagcattcaatgaagagatcgagagcactacacttgaagtacaatttcgaggccaaacaagcgaacctgaagcaaataaaaatagtagaaataaacgctctgggccagggggataattcaaaaaaataaatggccgaacccgtacatatatacctatcggtataagtttggtttagagtttcctgttagtggagattatggagttctatttatggttcttgttttaatatttgcatacggtatgtgaaattttgttgagagtactctttatttaggagtctttattatgtgtttctttttcgtggattgtgttagctattttaatcacggttgttactttagatctaagagaatgtgaattgttggggattaggtagtttcatatatttgatgggcatgtatggtgtcgtctaagaagaaataagaacgaatgggaatgaaaagttgtttatagcccatcctcaagggttataacatccatattcttctatcttttttatatggtataattttcatagattagcaaactatgaaaagaagggatgaatttggttcaaataaaagttacaccagaacgtctagagcaatcagcaaagatggtcattgattctaggactttactagaacagatacataaagacctgtatcagcaaacagaatacatagcttcacaatggagcggagcaactagtaatagattctatgcaatgtttaacgatgcaaagccattgatgttcaatatccttcaagagctagacaaaattgcaaaagagttatatcattctgccgaaaagtttcgtgaagctgatacattatatggagagaatttggttagtggagatattgaagaaggtgcaatgtgtggaaaaccaaaatctgatttagagaaggcttgggatggtctttatgatggggcaggaaaaggtgtcggtgatgcatgggaaggctttaaggcattgggagacggtgaaacatggtcaaatatgtgggatgcagttgttaattatgatgaaacgctacctgctatgtggaatgctttctctgattcttttatgaatgatgtttggtacggagatgttgaaagcggttttcattggggttcttatcttgtaacatcggttggtttaggacttcttggaggcaagggactggataaagcttcaacacttgctagaggggctaggttctctaaaataacccagattaccccaccacgtttacaacctgcctttgcaggtgtcggtttaactggtgaagctatgctcagtgcgttaccgccatcgggacactgggggaattatttgagtagctatctcatgtttgctaggccacattggcgagaatccgaaaaacatgcatatgagaaatatcctaattacaaagaccaagtatcatttaaagatagagaagaagtaccgtatgcaagtaaaggcagtactagaccagacggttttgaccatgacctaaatagtagtttggaggttaaaaattataaccttactaccgaaagagggaaacgttcgttaattaatgttttactaaaacaatttgaatatagattaaaaaatttaccagaaggtgcagagcagatagcttttattgatgcaagaggtcaaaatgtatcacttcaaactttaaaggaaattaaagaggaactatcacaaagaacatttggtaaattgaaggtaactatcgaaagagattagatagaagggagatgtatttatggcaacaggatttaaagcagactttctatggtatagattaggtacatctgattttgtacactcatttttctcaaccattagttttcatttagaaaaagagggttggggaacaaaatacccacacttgatgaaagagctatataacggaaggttaacacttcaaaatatcccaaaggcaatcgaggaagcaaaggaagctcgtgaaagattgaaattattttcaccatcagaggtagtatgggatatcgaagacttatccaagcaaccaccatggggagataatatttcaacagatattacagacttatctaactatttttacacaagtggcggtaaggacatgtttgaaatgttatttaaagcatgcaacgaagctttagaattagaagtagatttagaaatagagaatttataaagacatgaaatttcatcatgtctttttgttttgttcccatattcaaaaacatcctaaatgggtgtttttgcccatccccccgaaaagggggaataaggacaacaatactttattcttcttgatgttgcctaacttttttcaaaatgtcctttacaaagggtacagattacaaagggtctgcttttttatttgtttcctattacacaaaggcatcctctttcttcataacatttcacatttgtaaatcctgtcttataaaataggtttattaattcttcattcgttttccatttctccatatgatattgaattttaaaagtttcagcgaccaataaaaaggatccgtttggttgtaggacgcgaaatagttcttttatatcttgttccacatcaggccaaaagtagtgtgtttgaaaagcggttatgagatcgaagaagtttgtatgatagggaatagaagaaacgcttgcttgttgaacaaggactttttgtttttgaacatcctttatattcgtctgtatagaattttttacagcttgatcggagtaatcaatcccatatattttcccaagtggagttcgttttgaaagagtgtgtatcgttttaccgccgccacaaccgatatccaatatgattgcatctttctttatatgtactttttgtaatgcccaattggttagtctcgtatgtgcactgttcataatacaaagcatggaagaaccaattgtcccgcgaggcttttttgcttgctggattaatcgttgtaaaatactcaagttaaattctccttttatgtaagaatatatactcatttcgctttttataaattaaatcctttaaaaaaagcacgccgatagacggcgtacttctaacaatgcaaagccccttttaaccaattccgcgcccgatatgccccgactggaacttgaataagagatgtttcattcccagcatcaataccgtacaattgatcacatgaatttgtatcaaaacttagtaacggatgcccgcccatccccatagcagttgcagcaaaaacgagtttatgaacgaggataccagcttccatttggtgaatgcggtatcctctatagcctaatgcacgtgtatagtaatctttctgtccgactacatgtaagcaaagtggtacttgaaaaaggtttacgttatccatcgtcatactagactgaagtgggtagcgaaggtctccatatcgaattggttgtatggaatgtgttttactgttataagcgtaagctccgttttcaatatttttcacgctataaaaacatccgtataaggagacgcgtgtattttcatttgtatacttaccgtcaaggtcgttgtaataggggaaggaaaggctcgcttcttgtagtaaagtagcgagctcagcttcatcccatttcgttaaaataaaatccgcatcaggagaatatcgttttttacaaagttgtaggaaatcatacgataaccgttctacttttggtagctgtacagcgtacggattatgttgatagtgctcttcatgatgtagtgtttggaagtgtgctgttgattcgatcatagaagcttcatttatttttgttatcatcggatattcacctacatgttttgagcgaatgaaatgttcatgtgcgagcggcggaatttgttgcaacaactcatgagaagtaactgttttattttcacggtaatcattgtgaaaccaattagtttctggctctgtacttaaaggaataacggcatacacactttcttcaccttctgacaatccgagtaaatggttcagtgcacggtctagaaattgaaagtatacgccgtttgtataaccgaattgctttgcacattctagcaattgtccaatgaggaccccgctatctaatccttgaagacgatatgaaaaattattgtatttaaagaaatttttccaaaacatagtggatacgaatgcagcaccgaaacaatcatctatattacagcgattaccgagtgtgtctgccaaataagaatcgaaatttccttcgcgaagtaaaataagtcggtgatgtgcggcgtcataatggtaaatgccgtctgggtaatcgtcaatctttaaatagatatacaattcattcggatataaagcaccacccgaaggaatagatcttcgtaatacatttctctcgctatttagctgacataattgtgttacaccaaatgaataccaaaggtagtgaccaatctcatctaaagtaggtgtagtagaagagttcggtaaagataatgggatttctaaggagagcgggatggtaggtaaatttcgatataatttataaggaagcggtgcgtctttccagtccacctcatgattcggcataatttcatcgatagagaaatggagatgatgtaaaaaagtatctagctgcatgaaatccctcctttactatggaaacggatgtggatgtggatttaatctttcattcgttaaaggttcgtctgtatatccaagtgtcatcggtacggtatatacccggtccagtcctgtaactcgagtaagatggtgaccaaacgtcatcggtagcatgcctggaataataacttttacacaatgtaatccattcttttctatgaggggaacggtttgatctacaacgattatttcaagattagattgatgcaaacgatttaaaagttggtggagatcggatgttaaatccatatcaaatgattgtgatacattcatttcttggaacgtttgcaccggtgcatcttcccgtaaaaggaagtgaagacgttcttctgtttctttcaatccatacagcatactatggtcttccattttattaacgaaataaggatcttgtaagcatttttcgtagtattctcttttgtgctcgagctcatcgtctgttataagtaacatgcctgctatttcttgaatggcgctttttaaggctcgaataggatctaaatgagcgcctcctgcacaaacaacgttcattccattttcacgcgtattttttgcaattacccataagctaggaatgccgtgttccatcgtcgcgttaaaagcgtgtaattcatatccggtaatcgtacgtaaccgctgaatcattaattgtaattctgtatcatttgctgaattaagatccaggcggggaagaggtaattcggcataccaagtgagtaagaaggcatcacgctctacaatttctaaaatgccgtgaaaaatcgcttcttctaaactaccgccaattgcacatccatttgatgtttcatacacgaaagcatctcgatgaccgaggctataataagcaattgattcaggaactaaaagcggtctgttttgtgataaagaatatccccatacccagttttgctcataatcaggatcaaacggcttgaatggaaagttatcacgattgtaatgttcatttgtatggacaccgagtgtgaggggatttagtgcatgttcctctaaatcatgaaaactaccatgcacatttgtctttttccctcgaggcgacataccgcaatatcgttctaaaccttctaaaatagcagttgcttcactcactgcaaatgaatgagttcgtcccgcaacaccttcatttccgaacattaatggcatgtttataatgacgtcagcgaatggtaatacagaatgctgcatttttccgttcaacataccgacccgataatctaaatagtctctcgttaaaaatgtgtttagctcatgaatggaacggcagcgatacgtttcggtgcttacttttaaactcggttgtaaagaaacttccgccgcatccgcagtatcatcaggtaaattactacatacaggacagagaggatctggaagaaaagaatgccgcgtacattgtaatgtttgtaagtttagtaaaataagttcattttctaaagaagaatggttatgagttaatatttttcctgtttctgcgcaaataagatggcacatttgcaacattccattttgggtggcacgtacgtcacgtctcgttacattatctgctttaaaggcatatttccgctgtagttcccacatttctttttgatcaaagccagcgataaaacggcgtccatcagaacaatgggaacatccaggcgtaagaggatgaatgtaaggaccgataataccttcgccaaatgaagtaaaaccacgaagccatggaatatgatttgagcgaaaaataagttcggcatcatgatgaatagtagaaggagatccgtcatgtaatacgagagcgagatgaatattttcaggaagttcttctgtaagggtctgctgacgaatgatggaatattgtttgcataattgatcatgtacatagtctgcaagaaggccatctcctataagcaatatattttgaatcataaaccgtcctcctttgcaattaataccccatacacaccgtctaggttttcttttaaaaatggttcgattgctaaatcgaacacgaagggataaaaattatgttcttctaaatgctgtaaggcaagctgtaaagattgcacacttggaatttcttcttccgcttgtatttccactctaaaagaatccgtgtcatataaaataatagaggattcaggcaagatattagctctgtaaggaatttcttcattttgaacgtgaaagagtgatagttgtagtgcgtttcgtaacgctaacgtcatattaatattagatgcaccgtaccatctatcatttataccaacccaaacgactggaaaactgagaatctcttcactcattgcgattttaggtgtttcatggattgtagagagagcatcgtaataaaatttacaatgtttatcttgaatatcaattaaatcaacagttgtaagttcctctagaatatgtgactgccgctcatacagtttattgtttaaatgttgttgtagtgcccggtaaaatccttctgtcatcgtttctccagcaccgataccgatattgttatgttcaggaataaggcggtgaatgatttctgctacatatgtttcaattcctgttaaaccagcttctcggcgtgcttcattatgagtcaatccactacgagtcataagaggcagaaggggagctgggccatctgatagtggagtagctacttgaatatagcattgtgataatggtaattgatatgaatcttgttcatcccatacatggaatataccggcttctttagaagttaatgaatcgaaaaagcggaatacatcagttgaagtatgttggccataccgatgctcaagtttttcagaaatattttctatcgtatcaattgtaaaactttcatcagttgcaagagggtgttttataaaaggatgccacgttccttcaagtgtttcatagtttaataaaaagaattgtgattctttttcacgatatgaatcatccgcgacatgtttaaacaattcaaaaacgattacatttgctaacatggcagatgtaattggtgagaaggaatccgatgaattttcattttgtaaagtcgtttcatgtagccgatgccatgcggattcccagcattcatcacgattttctgttacgacaggtccagctataccgagtgttgataaacaaatagctggtatgaaattctttttcgtttctctacaaatagtgtgaactgtttttaaaccgtcaatgtctccgttttgagaaacatataaaatccaatcaaaaggttcgaatacttcacgcaagggacggtcaattgtagtatcgatttcttgaaggagtacactgttatcaacttcatatgcacgttctattagctcatgtattctgtcatagtttgtttcatcccgatctgtaacgaggtaatgaaatgtaggtaaaccagattctaataaagaagaaactaaggaagtgagcatatccccagaaccaagtacaaggacatttgctccgcggtatgtttcaaactttaaagcacctgaatgagaatcagcttctaaaaattcaatttgtgaagcatatctgtcgagtaatgtactgtttaattcatgaggtgcatcttgatttgcatcgcgaacgaaaccattttcatataaaatctctccaatttcaaatacacggttttgataggggagagggaggccatcggttatttcggctaaagaataattcccgttaaacattggcattaatttttcaatccaatcataaattccatcaccgtccatacgaaatgaactggcgttatttcgaaaatagacacccccgtttgaatcggggaggaagaaagtatccttatttactttaagttttgcatgaattggaaggttattcattttaatcctccttacgtttaggcatacattattaccttatgtcatgaaatttgtcccgtatgaacacaataaaaaaaggctgtagaatgattcattctacagcctttaatagatttttaatctatcaaccttctaataataatgactttggatcttcaagcatatctttaacagcaacaaggaagctaactgcttctttaccatcaacaatacggtgatcgtaagataaagcaatgtacatcattgggcggttttccatacgctcgttatcaattgcaactgggcgtacttggattttatgcattcctaaaataccaacttgtgggctatttaggatcggtgttgacattagagaaccgaacacaccaccgtttgtaattgtaaatgtaccaccttgtagttcttttaatgaaagtttgttgtcacgtgcttttttacctaattcacgaatttcactttcaatttcagcgaaatttaattggttggcatcgcgtacaactggaacaactaatccatctggagctgctactgcaataccgatatcatagaattttttaatgataagctcgtcaccttgaatttcagcatttaataatgggaattgttttaatgctgcaacaactgcttttgtgaagaatgacatgaagccaagacgtacatcatgttttttctcgaaagcatctttgcgttctttacgtaattccatgatcgcactcatatcaacttcgttaaaggttgttaacattgcagatgtttgttgaacttctacaagacgttttgcaattgtttgacggcggcgggacattttcacgcgctcaactggtttttcgaattccgtttttgcaactggagcaggagctggactctttggagcagctggtgcttcttttggtgctgcagcatgagcttgtacatcatgtggtctcacgcgtccaagtgggtctgtgctacgtacgtcgtttaagtcgattcctaattcacgagccatttttctagcagctggtgatgcgataggacggtttgtatttggtaacccttgtagtgttgcagtttgctcagcatttggtgccgcagctttcggtgcttcagtcgtttcttgttttggttgctcagccactggtgcaggtgtacttactgcaactggtgctccattagcatctaaaattgcgatagttgcaccaacttcaactgtatccccaggttcgcctagtaacttcgatacaatacctgaatcttctgcaatgatttctacattgactttatcagtttcaagctcaacaacgctgccacctttctcaactttgtcgcctacgttgataagccattgtgaaatagttccttcagtaatagattctgcaagctcaggtactttaatttcgatcattttaaatgtcctccccttatttgcctaacggtgtgttttttcttcttttgtcttcggtaatctccatttgttagcctggccttgggcagaatatctgcccaaggaacaagctagaaagcttcattgttactttttagttgctgtaaacttcaatttcttgtttatcttgacggaagttatacttcacatctaaagcatgtgcaacaattagttcttgctcagctttgtgagcgaatggatcgccgccagatggactagagcgatcaggacgtccaatgtagcctgttttcactttatctccagcaagttcgaacagaattggagccatgtaatgccatgcgcccatattacgaggttcttcttgaacccaaatgatttcttctaagtttttaaagcgtttaataatagattgaactttctcagcagggaatgggtacaattgctcaatacgaacgacatgaacttcgtctaagttgtactcatgtttaccagactcgatttctgctgctaagtcaatcgccattttacctgtgcttaaaacaagacgttttactttatttggtttcatgccaaggttttcttgttctaaagcaggttggaaacgtccttcgcttaactgactagcagttgaaagcgtaagtgggtgacgtaataaactcttcggcgtcatcaatactaatggtcgaacagcttctgttcctaagatagatgcttgacgacgcaggatatggaagtattgagccgcgctcgttaagtttgcaactgtccagttattctcagcagctaactgtaagaaacgctctggacgtgcactagagtgctctggtccttgaccttcataaccgtgtggtaatagaagaactaagccagatttttgaccccattttgctcttccagctgaaacatattgatcaaataatgcttgcgcagtatttgagaagtcaccatattgcgcttcccacataacaagagtttctggagcgaatacgttataaccatattcgtaaccaacaacagcagcctctgataacggactgttatgaacagagaatgaagcattaatgtttggtaagcgatgtaatggtgaatatgtttcatttgtatcagtatcgtgtaatacgatatgacggtgtgcgaatgtaccacgctgtgaatcttgaccagttaaacgaattggcgtaccttcttgtaaaatagaagcgaatgctaatgattcagcaagtgcccattcaattttgccgttctcttcaagagcatctttacggcgctcaagaattttcttcactttcggatatacgttaaagccttctggccaagatagtagaccttcattaattgcacgaagtgagtcaatctcaacgccagtatcaattgactgaataccttttgcaacaacatctggtactttaacgtgaattgttgcatcactcgtatcagctggtggtacgagtgcatagtcggattttaattgctcttgtataaactgtgtaattgtttcaacctcatctgcatttagaacaccagcagcttgtaattgatctgcataaattgctcttacagttggatggtttttaatttttttgtacacttgtggttgcgtaactgccgggtcatccatttcgttatgaccgtagcggcggtaaccaattaaatcgattaagaagtcttttttgaacaacatgcgatattgaatcgcaaggttagcagctgcaagacaagcttccggatcatcagcattcacgtgaacaatcggaatatcgaaaccttttgcaaggtcacttgaatatttcgtagaacgagaatcatagctatcagtcgtaaaaccaactgcattgtttgcgataacatgaatcgttccgcctgtttgatacgcgttcaatctgcttaagttgagtgtctcagatacaataccttgaccagggaatgcagcatcaccatgaactaaaattacgaatgattttgaagtatcttgatctggaagaccagattttttacgattctcttgagccgcacgtgcgaaaccttctactacaggattcacgaactcaagatgactcgggttatttgctaatgtaacgcgagtactaacttcttcgttactaacgacttgttctctacctaaatggtatttcacgtcgccagtccagccagaattagccactgcgccttctatttttgcatgtttgaactcagcaaacatgtggctatatggtttttctaatacgtgagcaagtacgcttaggcgaccgcggtgagccataccaatcatgacatcctctacgccgttcttagcaccttctagaacaatttcatctaaaacaggtacaagcatatcaacgccctcgatagagaaacgtttttgcccaacgaatgttttatgcaagaattgctcgaaaccttcaacagctgttaaacgttttaaaagagcagttcgttttttatttgatagtggttgacgcaatgaatttgattccaccatttgatgcaaccacgcgcgttcttcactatcttgtatatgagaaaattcataagctaaagattttgtataaacgtcttttaatctatgaattacatcaagtgcagtgtgaataccttctggtgcatcttgccataccgttttcgctggaatcgctttcaagtcagcatcgctcagttcgttcattgctttctcaagaagagattgtccatttgcagcatcttccatcgggttgatgtgagccaacgtgtgcccgaaagaacgaatctgctcaacaagttgaacgactttaagaattttttcaatgttacctgtgttttgaggagaaaaatgtgttgctgtgttgtcccctgttacgacatcatcttgaaacgaaggagctccaaaaatttcaaaaagctcttgtaattccggatcaacagaacctgctccagttacgtaaagatcatactgctcaataacataaccaaggttcggaccgtggaacttggcccaagggtttgtcgttgtattcttcctcgtcatttgtttaaacctcccaatgcatataatccttttccatacaaaggtgcattttgctctttttcaataagtaatgaatcaataatcaatgtaaatgtttttctttactcttatgttattacaataatttacataataccaaacactattacttatctgttttgtaaaaaaacattcacaataacttatcacccaagttaatctttcatgttataaagtaattttacagaaaaatggggtggatatatttggtatgcctatactaatagctataattgttgcatttaaatataggtataatagttagaatgtttcgataaaaacagtttgaattatgtatattgaaataataagcgctttcatagatattatacaacaatataacggaatatagtataaaaaataaaaaattatgaatttatcgtaaactttatttagatagtgttaaatattgaaaggaaagtgaaggatttctacaaaaaaagttgctaaacataaaaaatgctccataaacagttagtttctataaatatgacgaaaaacaccgtaaaacaaataacgcatttcgtgaaataaagaaataaatgaaatattttaaaaggataaaacaaatatggagatattaaattttaaaaaaagaagtgaggagatatagtaacagttatttacagtgttccgtgtttcgcttcaaaatagacgtgctgaaatttaaaaaagtttcttctatataaatagcgtgaataataatcaaaatatatgtaaagggaacttgacgtaaagtttactttacatatatactcggtatatggaaggagggagaaatttccttggaaaataaaatggtcgaataccgaaaaaaatttggactatctcaagaaaagttggctgagaaacttggagtttccagacaaaccattatctcaattgaaaaagggaaatacgatccatcacttccgctagcatttgaaatagcgaaaacatttcagacaacaatagaacatgtatttatttatgaaggaaaagaagagggggaatagggatgaattattcacaaaagtactttgtaattatggggattatttttctatttatgagtggatttatgatattaacaggtataatgacgcattctgcaccgccagccataacgtatccattgctggggatgatgattatgtgtttctgtctaagctacttgcatccgcaatttaaagaaaaagacgagcgaatgaaactgattcgttataaaggaatgtttgtaaccttttttgcattaacggcatattatcttcttttctctatcggcttaaacttaaaaatacttacactatcagctactgaattattgaatatacttatggcacttacaatgagtaccgtctttatctcatttgttgttttagcaaaaagatattaagatggaggagagaaaggaagattaacatatgcaaatgatgtatgcttttggcattgggcttgtattatttttagccgtattcttatttattcgtaaagacgttcaaggtgggacgttaacgaagcgaggattttataaattaatcggctgtttagttgttatgcttatagcaattattgtaatgatcgtattaattaatcagtcactatagaatgtaaaaacggaaccttacttcggtaaggttttttttattattaaacctaaaaattaccaccaaatccatttaccgtaaataatttgtgttatataatccaatgaaatgatagataaggagtgtagtatttgaataaaagaactatcttctatttattaacttgtatactactggtagctagtactacttatataatatgtaacaaaagagaacaagtgccacctatattagtatgggacgaacaagaatactatgttacgaatgaacctgtcaaagtagaagaagttgggcaaaaacttggcgaagtaacaaagaaaattaaaacaagtaaaaaacctactaaaaatagagaatctaatacattacaagagaaaacagaagtattcataatgattgaggaagaaaaaagtgattacccgcctttaatcataaaggaagcttatagtgatgaatatagggtagtgaggccgatgttgaagcaagtattatgatgaaaaggaggttcatatgcagacactaactccgcatccgtagtcgttaagaaaaatatttgtctttttcctcctatcggtgccgcttacattttgatgaatagaggagcaatacaaaagagagattacattttatatttattatttgctactatgaatatatcactctggttatcgcttatgatttttgatcggagtatgtggatggtagcagggcattatgtgtttggagcagttgttgttgtttcgaatatgaataagagataagccagcaacctcaaagttgctggtttttattttgctatttataataaagaaacaaatttttaatagagagtagtgggcgttatgagatggaaagagggaacgtttgaaaaaatagacacgaatgactcacctgttgagcaacttataaacacgtttaaggaacaaaacttaattggtggagcaataataagctgttttaaagtgcataacgaaaatttttttaaagaaataccacattcgaaagatggacatgagcacttctttagaagaatcttcaactctttagacataatcaataacttagaagagttaaaaatacatacatcagacaaatataagttttgttttaaagagcagctcgcagtcatgcttgatggtagcattgctgcgcaaattttgtggggcggagcatatgaagggtttaaggaacgaccagttatcgcaaaacaattagcagtcaatgtatgtcaatatatgttccaagatcgatacgaagatattaaagtgttcgaaagctatcgcccttggacagattggttttacgatgttgcgtgggatgttacttggatggtgttagatagtagggaacagaaaatgtggttcatttgtgctacggatacagattgatagaagccgggccttgtaggaatgctgcaaggccctttatcttttgggaattaatagaaaacgaatcatataaatgatatactaaaaaatgtttgtaatgtcagtttcatactattatataatgctgacttactagaaaagataagaggagaatgagcgtgcaaaagataaagagattattgctattaatgatggtagtaggattaacagcagttgttttagcagggtgtgcaaatccgaaagatactacagaagaatttttaacagcgatacaaaaaggtgatgtagaaaaggctcgtacatttgttgagagtgacaaggaatttaataaactaaatgaaaaaacagatgatgctgaggcaaaagcaatgctaagtgcaattacaaaaacctttaaatttgaaaagctagaagaagtatcgaaaaaggatgacaaagcagaagtgaaagtgaaaattacatctgctgatctatccgttgctgtaacaaaagcagtgggagaagttatgccaatggcgttcgctagtgcctttagtgaagacaaagaacaatctgaaaaagcaatcgaaaaaacaatgacatcaactatcgtcaaaaacttagcagataaagatgcagcaatggcaactcgcgaagttacattgaacttaaagaaagacaaagatggcgactataaaatcgttgctgacgataacttgaaagaagtattgtttgccaatgcgaagtctttggagaagatgtttggtgggaagtaattgaattagataaaaagagacaccatatcacgtagaatggtcatctccctgtcaagtagacagaaataaaaagagtattatgccacggccttttcccgatattctatcggggaaaggcccccgccacggcttcgctcactttagaagctaaattatattggtcataataccaaacctcgacaccgcctttttctgacgttgcttggttgaagtgaatcgctacgtccacacgatctcttgtatggctgttacaattcgctatgatgttgtttaaattctggcgttgtgtgcgtccgtcgttgtctgtagtgattgcatagtgaattccgttctcttcgcataattcagcgattctttgcacgactcgtcttgtttcgacttcctccttgtacccatttgcatgtgctcctgtcacaaagtagttatgcccagcgtgaaaagtttttaattgtcccattctaattttcctccctttaatatgcacattgccatgtgccactgattttggtatttgttgcgttcgggtcaccattcaccctattttccatttgtataatttgtccggcttggtctacgatcattgtcatacttccatatgtggaatcagctttcgaatacatagcctgtataactgtttcgtataacggggcaaactctttcggtacacgtcccacgattttataagcaccaccgttaccatgtagcaggtcaccgaatagtgttacaatgtcccctcgcttggtataaagtaacccgtcaccacgatggtaaaaacctgtcgcggggtctagtgccacttgacggaatccaattgtattctttttcaaatagagttcttcggctttgctttccgttaatagtcttcgcccgccttcatatacgccttgtgtatcacctgttacacttgaccaaacaagggtatatccacgttcggtaaactccgtgtccacctcaaaatactctttacattcaattgcatgatagacgaatacaccaccctttgaatagggagatagaacaagataaagaacatgaaacccttccccgtctttgtatatttcaaaacggtaactatcttcgcgggaatctcctacttttagtagggatggtttgataagtgaagcgggcccgccgtttcgaacaccaaatgaaaaggtgtataacggttgcgttgtacccgtgaatccaaagttactttgcgggaaaagttgtccttgaagaacagacccttccgcgctatcaactgggtttcttgattggattctagcaaccctataataaagaggtctttcgctcgtttgcggtatcctctttgtttttgtttctataactggaaatggtttaacaagccccatctattacacccctaacagccgaaccattccatttccggattggcgcacaaatgttattttatttgcttttctcgtaaactctgataattgttcaccgggtttcaaacgaatggttacattcttaccggataataaatttggatttaatgtattatcatcaaagtttaggaatagatcggtgtcaccttcattcactaagtacgagaatttaatgacgtcacctacattgcatacatagttccctgtcccgatcattgcttcgaaatagaagtgacttgctcgcaccgggtcattcgtaacctgtacaggtggcatactggaaatcgaaaccccaccttgtacattcacacttccgatatgactttcaccttcagcaagtggcggtagtttcgtgacacctacgttaccaatcatatttgtacccgatggtaatgttttaaactcaattggaatggtaggcatttccgtgacaactactttacctatattgttattcccagcaggtaacgcgcttgtaaatccttttaccgtgacggtatcacttaccccaccgccaccgtttgaaatcggggcaacacttccgctatttgctagtacagcagggttaaacggttcgttaaacgatgttaaaatgattcttgcagcatccgcactatcgttataaatttggatttgggaagaaccttctttccttgctaaaatgtttcgtccattacccggtacaagtaattcgtattctcttggacttggtaggacacgaacgcccgcgtatagcgtcgctacagatagattgttaatgtcataatggtttgggtttgtatcaatgaaatgatgtgtatacgccattttaggcggtagtgtgagcgtgacctcacgccatgtattatcctttaacatgtttttcaactccttaaaatacttttacttttatatccgggaatgcttggaagaagaaatatacagctacgatcagaaagacaagaatcataacagcacgaacgattccaacaaatgcacttgtgataaatcctttgtcggaatttggggaagccgtccccgtgcttagggcaccgccaccgtcacccgtgggcctgtcgatcaatgttttatcgcctacgtacatctttccggcttggtgttttccctcttgccacccgacgtgtacatgatcgtagtgtccagcagtttgccataacacttccgtaaatagcggtgacgttttcgcccatttcgcaaattcgtccattttatctttcgaacccgcgaagtccatagccatgccttgggaatggctatccggtctcccgcttggtccggtagaaccggggcggtatccgcttgtgaatcgcaaaccaagggataacgtcttgtcatatacttgcttcaacttgtcgtttagtttgagtccctgtagttccgccattcgtagcaccgcctttcggttttacttttttatatcctctagatcgtgaggatgactttgtaactttctttgctccgctctttgccgtagcttccacttgtgggaatgccttggcaaaaaagagaacacaaaccacaaaagccaataagataagcaaggcgcgaatgactccattagcgacacttgtgaatattccacgtttatcactccctccaccggcaggaacgcttccctctccggtgtatggcgtcccgtcgtcatacttgtctaatccgttttgcttaataatagatatcaattgtcccgcatagttggggtcagtcgcgtatccgcccgccttaatcccgcgcgcaaagtcctcaaatgtcttcgcattttttagttgggacgcatagcgcggtgtttgcagcaaccgagcatggtcagccatcgactcatagtagctgttatatttccggaatccagaaacacgaccaccgcccgcgtcatactcttgtgaccatacagtatgtgttccggcaggtccgacacctttaatgccaaatagattcttagcattataggcaagaccggacattccgccgggattctttccgctagattcaaacaccatttgaccgagaataatagaagcagggattccagtttctttttggattcgttgggcgtcgtttatgaatggtctaacatctagagccattaattaataactcctagaatgtgcgccatagcttggtgcgtccccggtcttcactttcccgacttccattccgccccattgtttgtcttggacaccttttttcacaaggtcagccatttcttgacggtcttttccgtatgcttccacaacatagtaatccttcgcgcccgcccatccatctttaatgaattgttttctgacatatgtcgtacttgctccagaattaattaaatattgttgacgttttaacgcttcatcactgttatcgaatgtgacataaatctttgttagttcagcagggtctttcttcccttgcagttctaaaatggaattaagcaattcttcttgtcgcccgacaagcgtgttcattccatcttgcacaacagcattttgactaccgagcgttggatagtttgtatagtagtccttcaattcttcctctacggcttcttgcgatgaaccaccgctatgctttgccttattcataaaaagagccactaggacgacggcaattccgcctcctagtaatagcatcttttgttttttgtcaaacttcggtttatgttttccgccactcccaccgcttgcaggagggtcgagtctttcaaattctggcattccctacacccccataatgggattcccgaaatagtagccttgcgggaaatcctctcttcggatttgttcgttttgcaagtttggtcgtgttttctcccacggttcttttaccgggtcagccacaaccatttttggctgctttgctgtatgcttcaccagtaacgcataagagccgaggtactcgtcaaactccacgttcaatctgatagagggttcatatacgggcttgtccaacgcttggaacgcgtgacgatttaaattgtcgcgcttgtaatccatataaaaccctcctatcgtccttgtaatgttttaatgcccgcaattgagtttttacccatcgcttcaatgattgacactgtttctcgaccatttgaaaggaacaaataaataccaatgagcattccaattcccgcgatcatgtcgaatacttttgtcatactctcacctcatttaatagttttataaacttgtccgaatttgtaacaaccatactcattaatacgagtagcaaaaatccatttgttacacgctcgttcgtaaaggattgcaataggacggtcacggacataaagaagatgacgaatggcattgactccgtaaattctttcatttaaaccaccctttcaccgtaccccacgtatcctcgaataagtcctcccaactgtatccgagccaccccttatctttatacgcgttcgtttcggcacgtttcttgctctgttcggaaagacgttctaacacttctttctttttggggtctttttcattctttgcaggtttttcaaacagaatttcacccgcttttttatccgcttctttttgcgcttcccttgtattctttgttgtttcttttacagactctttcgcaccgtccaccactttctcagcaacttcccccgggctaggcattgataagtccggcgtcatcatttgcgccaattttgatagacgtttctttccgacaaagtcgtcaaacacgagccataaaaataaaagggatagagtgagaaacgttaaacctttcgcgtcgttgttcacatgtcatcacgcctttttctttcgaattacaaagaaccataaagcaagaatggcaacaactaggattaatgatttactcatgcttaccgccaccattcttttcaattgctatctttaaatcagttaacgcacccgtcatagcttgtgtatcctttgattgttttgtcatcataaaaatagccgtgaaaatcgggaatcccacttgactaatgaattgagcaatctcattcatgacttacaacctccccgccacataaccgaatgcgattatgataatgatgaataaaccaatggacttccaaatgcttgcacctgtcactgggtcggacttcggtttcacatctgtcttgatgtccttttcatccactaatacaacttggtcacccatttccgctacggtgattccacttgtcgtattgaaacccgtatccgggtatagatcgtgatagaaatgattcagtcccattctgttccctccttataaataggtaaggagcataaagccccttacatttgtagtcgtgatattgtttccgatacgacagtgactttcccgcctacttgcgtgctgaagcggaaccagaattctgttaaacgctccgtatccacatagtcgcgtgaccctccgaggtttggtacaccttggaatgagaagtcaaagcaatacatacccggtggaagtggatagcctagattactatgactttcgtgtacgagtatttccggcttgatattataaggcgtgtccgcttggttaaagacaagttccatattacccgtgaagtcttttggctctaatggtttcccgtttaagtcttcgatgtagagtatgagtttacgataaatcgtccctacgtttagttttaaaatgttttgtccaccgccactgaaaatgtccgatttcgattgtacgagtttcagtacagacatatccggttgcccgcccggaatcgacggaatagagaatgtttcgatctctggtgtaatggacatagatttaaatatgacttggtcattatttgatggatttaatttatatgcatttgctaattggtcaacggcaattgataagtttacgttagccgtgttgttttgcagcataaccattccgaccgggtcacgttcatttaaactaacagggattgggattgtaaattgaatttcattgtccttcccggctgttgttgctacgttttccacatagtttaagtattgtttattcgcacctggtaacaatacgtccggatgattacgtaaaacgttatacataaacagttctttccctgatacaatataaggactgaagccgttatttaagttgagttctactcggcgtaaaataccatatggagacattgggtcgcgttgaatgttcccgctagagcttttcaacgtggctacggcttttacatgtagcatgatttttgttaatagacgcgctttcggtaatgtgaaatcaagcgtcataccttcttgtgtaacaacttgcgttggtaatgtttgtttgtattgtcgtgttgacgtcgcccagatcattgcgcgttgttgcggtgaatattgctctttctgttgtgccattagtttgttcctccttcaacaagtccgcttcccgcgccttgttcacgtttgattcgttccagttccgcttgctttgcttcattcgctaaacgttcttttcgttcgccttcacgaatttcaaagtcagcaaaacgttcatttgattccacatattccgcattttcataacgacttttaaaattagctagctgttcaaatgtcggtttcgttcctgtgaaatgtgtattaatacgattcatatttccatcataaatagtaactacatgcatgttataccgcctccgcaatcggtcttacaaccggaatattatacttatcagaaccttttttaattaaataaatgaaaatcattgtcacaaatgtgttgataaacatagatacccaccatgacgggctaaatagttttcccatttttcttttcctcctttttcttactttttcttaaatccattgcaattcatgatgttcgctcctactataatccctagagcaaatgacgacatagccgtcggaacaataacttctaataaatgcatgtcacacctcctatacggcttggacaacttcacttagtcctttcaccggatgttttgttaaaatcgctttcgccatgactgttaataagataaacatgagccataggacaataatatttttcagtccgacccctgcaaatttaccctccacattgtcaccccctttcaaagtttcaaagtggcgcggacaggttcgtcgtcactatcccgcatgtaccagaaattacgataacccggtttgtccataaacatatcagaccccaaatcatcggcaacacgctttctatccgccactttattcaaatcaaaaataaagaagtgtgtagagttggacataatatccgatggaatcgttgcaggtctttgtgtacatgcccatacgacggaatccacaaagcgtcctcgctgatagaggtgtttcatatgatacggatacttacttggacttggacaaacttgcattaactcgtctatccataaaattgtgttatgtcgctcatacacccatttcataagcgcgtcataatactcttcatcttgctcttccggaatcggacaataaattacctttttcgtgcgggcttcggctacttcttccagtgtctcgaccagtacaaagtctttcccttcctttaacccataccataggttctcgcctttcttccgtctctcaagtgactgtcctttcgtatctaacataatcacatggtcgtacccggctaggtaaacctcagcaagaaacgattttccgctacctgttttaccagctataaaaacatgttggtcagtcgggattgcttgcatgtttcttcattcccttcttgctgtaactcctttccgtgcgcaatacaccttttccatttcgtaacgccttaaatcgtgacgaataggggatacgtggtagtaacgtgttaaaataatgctcgtccatacggtgacagatatcgccgtattcaaagaccacatatttctcaccaatcgttacaaaccactcgtccagttttggtaagcacggacaccaatttgtacgccaatcatcaagcggaatagaatagatacacctactcgcccggataagtaccgtattggacatagtcaatcacttctttcagcttttcaagtccattgtcgatttgttcgtcaaagtcctcaaaatggagcgcttgccggaatgagttgattgagttccccgctaaaagcttgactggaagtggaaggttttccaacacttggtccgctacttgctccagtcgttcctgttttgtttgccccggtgtttccggtaggctgaattgatttagcataatttgttaccacctgcgctttcttctgttttcttgtggcattccacattaagaattttggtacaaagattgtaaagcatgcgatagcaagtgcaatcgcgtcactattttccccgactttttcgagtgctgcggtttttgctaacatattctctatcggttcacatagcgtattaatttctgtttcacttaaagcccatatttcaaacccttcacgggtagccaccatttgtgacactgtcattagaattggtttcaattgcaagatttccattgacggtgcttttgatttcccgctagatcgtggggaagattttgtattcgcgcgcgaacgggcttttcgttccctgtcctttttgcgcttctcttctagcttcttttcctctccagacagttccacttctttaccaggaacgtctacaggaaccaacttaggaagccctgtttcttcggcttgtccgtttcctccacttcctccacttccggctcctcgtcttcctctacttttggcttcggtggtaccggtactttttgcgttccctgttgttcctccactttcggtgttactaggtctatcagcttttgtgcccatgctggtgcttcctcctcgctttttgattttggtttacgttttggtttcggcttttcttcttcctcttcttcctcttcctcaacctcttcgatctcttcctcttcttcctcgtttttcttacgcgcgaagaattgtccgtcaccgaatcgtaatagaaaggggttttcttcaattgcttttagcatgtctgtcatttgaatcatctccttctatatcttgtaatttttcatctagtttatcgcctaaataattcatgttgtcgcgtattaattcttcattgaaatctctcataaacgatacatgacttgttaatgattcattttcttgtagcaaatgatagattcgttttgtaagaatagaatttaattttcgtagttcttcattttgttcttcatatcgctttactaacgtcttacaatccatctgtcacactccttatcgaatgtttgttctgtatatgtatactataatacgaacaattgttccgcataacgtcacacgtgtgtcattttggacaaataaaaaagactagcaactttgctagtccttttccgcattttctgttttcttttctagttccttgtagtcttcttttgttacttgcattaacctgtcgatgacatacgacttgcttacgacttgtttgctagattgtgatagttcgatgataaagtcgagcaatttgtcacgcatacctttcccctccttataacaactggatggctctaggtctttgatgcactctcctaattcgtcctttactttccaattgcattaaatagcgatgtgctgtcttatgacttacgtacattcgactcgccatatctcgcacactcggtgcaaacccaaactcttccatatacccgcttatacattctaacgtatcctgttcccttggcgtcaacatttttcgtcactccctattataagaaacttaattcgcctaatagttctttcatgtcccatcctgtctttttacaccaatcttgaatcggaagtccctcatttgaaaaacacatagctttcgcttttgaagaatactctttataaagtccgtataacttcctttgctttttctctggtatttgtatctttccaaacttcatacaaagttcctctaccgcattcatatcatcgttaaactcttctaatctttcataccattcgtcaaactcatactctgacttttcgtccttattttccccatagtcattacgaactagaggtgaggtaatatttttatttagatcaatgtttcttttttgttccctagcaaaattaattgttttatgcatttccgctagttcgttcatttctatattatttttagatttcgtcaagaatttttgaacacgttccccgcctttataaataggaatttcggctttcccacgttttacttgtaaataccatttacgaaatgaattgtagtctagttgttcctctacaacccatttcggaacacctttcattcgtaatacttcctcatattcaccatcggtattaatagctttttccgcatacatttttggttggaaatagagtccttcaataacatacccttctaacttccactttccatactctttatcgtgaaccattttatcaggaaatttcgtagttgttgcacaactgtccgtatcacaataagccaaaattcctttttcatgcgcatacttcaatcctttaaatagtagaattcttgcaatagaagtaatatatgctgaaatatgtggttgaatatattcagccatagcatatccgtcatactctaaaaattccattcgaattccattcatatcatatatgatctcgcttactgtatgtccttctgcttcaagtttatctctctcagaaatatcagcatacatgattcgttcccgctgcattgcaaattttccatacaacgcattctgcataagttttgaaaaggctcgtttagcacctttacttgtattttttatttcctcaaaatacgaaataaattcacgaaagacaggtgctgttttctcaaatacaacaccgctttcgattttttctattttgcaaccttccgcttctgctaaagctagttccggaaatgtccaaacaccttctattttaccaactgggaaaatcaatttacctgtatagtcttttttaggtaagataggaatatacatatcttcgggtacatgtaccttcgcatgtataaagcctgctccatatcttcttcttttccatagatcaaaagaaagttctgcttcttcattatccagtacattcgggtatccgactggcatttcagccattttcataacatatggatataaactatttttatcatagtggtatccgttttctattcttggtgtaaaaacttcggttcttcctccatagtagccttttctaataaatgcctctaaaccttttcctagttgtttatgattatattgttttgtagaaatagcaactttataatccttcttatactgttctttataaactgttttagctagggaagctgtagtcggacaattaataaattgttcaacttctaattttgataggcctattacaatttccaagattttatataaactacgacaatcatattccatgtactcacataggacagggtcatctttatctactgttgtaaagaaattaccttttgtaagtcgcttgttcaatttacggttttttacattataaataccgtaattattttcttccatataatcgacaatatccatcttcccaccttctaaaaggtcgaaatctctacataagttttcaagtgaagacggtagcaatcggaagctatcatgtagtataatatgagaagcggtaaacgttactatattaccattgataaatagcgagttattaaatgttggttcagcataatcacgtaactctgctatgatcttggaaaggtcgaagtctaggttatgtatatatacatgacagtcatatgctttgtacttttcaaacactggtaatacgtctgcaaacgtatagccagtatagtattgttttccatcgaatagtccaattcgaaacacgtcgccgtccaaaccacgtgtttcagtatctagcgtaaagagtttaatctctctacgcttttttctattagtagtactcatcgttatcccaactttctttcgtatatgatttagtatcatatatcttctgaatctcattagcgttcctatgtgcttgtttatatggtaaggaacgaagattatttaataactgctttaaatacttgtcacggtcttttacgtcgtaaacaccaaccattatcgtttctattgctgttaatagttttgtaagttcttttccttgtccctcatatatctttacatagccgtgattcttccaaagtgtattggttttagatacatcacgttttgggacaatccgcatagcaacccttcctaaaaatagtttgttctgggcgttctgcaaccaacctattatagacctagtaatttggctacgtgatcttgtattgtttctctttttaaaatcatatataaacttactgtctgtctcacctgtaaagtcctgatagtatattactagaaaaggtgcttccctatcttgttctttttttattctctctatttccggaagtaactttttccatgaattaaacttactcggtgaaagtccccactgtcttgctagatttgctatttccctagcacgctctctatttttcctattatgcgctttctttttataaacagtttctaactctctacctttcagcttctttgtttctttcttactataaccttctgaaacaagtaacgactttttacgtttcgtttctaatttcttctttaaccgtttatttgccattgtatcacctacttataaagccatgtgacccgtaacaactaggtcacaggtctttggcttacatggctttcttttctgtaatagagttcataaagttggctatcacattatcaaaattagacatagctgcaaccatgtctaactcttcttttgttaacacgacggatgtttcatcttcttctaacttttgcttcaaatgcaccattccattaaaagagacaaattccagttctcgttcatttgtccgaatagatacttgaactaagtttttaatagcgttcacgaccgcaccatccttttatgttttaaaaaagaggatacacaatgtgcaccctcattcatttgttacaaaaattagccttgtagttgaagagttaatgttttaaatcctttacgtgttttcacttctgccggaacaatttctaaaggctcgttccaaggtgctggacctacaatactaataatcttttgaatagatgatacgaccccttgtgacaccgcgtggtatgctttaccgttcttatcaattaaaacaacacgtaatgcatccacatcttcttttgtcaattcatcttgtagagtaatagcatgagcaaccatgtccgtgatttctaatacttcacctctatgatctgctagagcattctcactagagttaatagcattataaactttgatagctgatttacgatctttactttgaatagatgagaagaatacatccttcgctccgtccgcttcaaagattgaaggtgacaccttgtccactgttacgatgtcatttgtatttacatgctcgtccactaccgcgatttcgttaacctcattatttaattgtttagtattgttttccattgaatattcctcctattaattgtccattttatttttattttccaatagtccttttgcatcttcctctttaataaggaatttgtttgctaccttagaagcgtctaactttccagaatgtatcattctatggatagtctttttatgaacacgcaataagtctgcaacctcttgcgcagtcagtagtttactcatattacatatgcaccaccttcttttcacttgtatagagagtatgtatcgtgtctcgatttgtcccgtttgtccctctctgctaccaatattacccgaaagttaccagtaatgcaaatgtttttatgttacagttatgttacaaaaaccgaacatctataaaacgcgtgttcgttttcaactcatttcctattatagcacccttggaatatcttgtcacacttttccttttggaaattccaataaattttccaaattgtcaatagttaattttagaaaattttgtatatcatatttcataaatgttattacgtgtcaataggtaaatattttaataggctagtagaggtacataatgaaaatgtacatatttattcaagcgttaatgtacatatttaagttagcatttatacctcttggaaatgcgatgatgaagaaaatcgaaatatacgctgggttaaaggtttacgagaaagcttagatccttatacactaggtgactatgtgaactggcccgatatcgatattaaaaattggcaaactagttattatggctctaactttcacagattacgtaaagtaaaaaccatgtatgatccttgtgatgtttttcatttccaacaaagtattcctccttttcatacatgaaaaaaggggataacataaaaaaatcatccaatataccgttacctcgcagtatgttggatgattcaagttgattttctatatcgtttcaaattcttgctcctactcataaacttttacttacagattaattgtatttcgtatcattttcatgcaatgaatgtaatttaatatttggtactttatctttttcaatacctctattataagaaacaggaacttgaaattcgaattgctttgtctcatgtttttgtaaatagactggtttcggtactggatagctttttgaattctcgtttgcattatcgtataaaacaacttttaatgcttgtgaatgattacgataattttttaaagtaacaatgcacttcggttggatattctctccatttttctccattctacactggctatcttcttttttatattctattgcttctacccctgtttttcctgcgtagtaccatgttttattcaatgtctggaggattgtatttaaaataaacggcatcattacaatcaaaatactaatgcctactacttttatcttattcgtttttctaaatgtactagactccttttttcctagccattttaaaaataatataaatgcaattacatgtagtatgaaagaaacaatcaatatatttgagactttataatccatataaacatacgtatgtatcggaaccttatagacattgaatagtttttccccaattaattcattatcatttggaatttttaataataacaaaacccctatactgtaacaaatagctactaatcgatcatactcaatacgaatcattctttctccccttcactttgtattttattatcgattttagctattattaccatactatacaatctttttatagaggataacgtaaaaaagttccttataaatatataaagaaccttattaatatacactatgaattaaaaaatcaatatacaattttcacatagagatttcttcaaaatatgttggattatgtattgtaatttttttatctaaaattgtaacaatgctatcattttttaattgttttaatacgctgctaactgtctctcgagatgttccagatattttagatatttcaattgttgtaagtggacatgaaattacaatcttttctccactctgttctcctaaatcctgcattaaataatttaacgtttggataacacgatcttgtgcattaggaattgtaatattttgcactcgattttcgttcaattttaatatagatgataattgctgaacaacgtacatcaattgcgttctgctggactttaccatatcttcaaagattaccgttggaatataatatacctccacatccgtcattgcttctgctgtatagttatatcctctgtctgtaaacataccaccataaggaaaaatagaatatcgcttcacatagtcatcgtataataagttcccattttgattaacccgctctaactttacaaaaccatctaacatgaagtaaattctttctcttgaatccccttctaaaaataaaaattgaccttttttataagttcgccaataaacaaactctgttaagcctttcaattttttttctgttaaatgagcaaataattcgaactgctttaagtctttcactacgttccgtctattcataaaattccctctctcttgctgtatgttggagcgaaaaaatcaagaaagcgtattcaatttgaattttatcataattaacttacatattcagatttcatcatgaaaactttatgaacaatgagtacaaaaaatattaataaataaaaagaatgaagttactaactccattcttttttactactaagtagcgtacataagaatttaaacatacatgcatacattctgttttgaaataatagtaccagctttttcttctagtgcttcatatactttttctaaagacgtaataattgtttttctttttggatttgtattaacaaaattaatagcagcttcaattttcggaagcatgcttcccgcagcgaattgttgttcttcaatatattcttctaattgattcactgtgacatgctctaattttttttgattcggttgattataatttacatacacatgatcaactgcagttaaaataacgagcgtatcggcatctactaattctgctaatttctgtgcagcgaaatctttatcgataaccgcttcagttccttttagcccttcttcggaatcaattactggaattccacctccgccaacagctatcactatatttccatcttcgaccaaagaattaatcactttatgttcatgaatacttacaggcttcggtgatggaacaacacgtctccatcctctaccagcatcttctttaaacactgcttttgtttcatccattaatcttctggcctcttcttctgtataaaaaggaccgattggtttagttggatttttaaatgcctcatcttttttatccacaacaacgcgtgttataaccgttgctacgtctttttttatattccgttttttcaatgccttttcaatcgcattttccatccaatatccaatcattccttggctcattgccccacaagtatctaatggcattgcaggtgtcttttccgtttctgcagctttttgctgtaataaaatattccccacttgtgggccatttccatgcgcaattactatatccacatcattttccattattttcacaagttgttctgccgttttttccaacgcttcttgctgcgctcccgcagtagcttctccagactgtatcgcatttccccctagtgcaactacaatttttcttcgtgccatattccagccctccagttgatttcgctttcacagcgctttataaagtaatactgcctgtaattaatccataaatcgcaaagaatgctaaagcaccaattgctacggatgatgctaattccactcgagtaaatatttgcttcgaactcttttgcttttgaacattgtaaaaaataaaaatacctggcgcatataaagtcattgttaataataaatactctaaaccagctgcataaactagccacacgccataaatactggctatcaagccaattattatatttttatttcgatctgcttcttcagactttaagctatgcttcagttgataaaacgctgaaaaagcatatgggattaaaatagctgaagatgctaaagagaatgcaaagttatacgcctgatcagaaacgacgaatgttaacaagaacatttgtattaaaccatttgttatccataatgaatttactggagccttatttttattttcttttgcaaaccattttggaaatactccatctttagccgctaaatatggaatttcagaagcgagcaaagtccaacctaaccaagcacctaatacagagatgaccaaacctaaattaataaaaatagcaccccattttccaacaacactttcaaataaataagccatagccggatttttcaaacctgcaatatctgcttgctgcataagtccaagagacaataatgtgattaaaatataaatgatgagtgtaccaattaagccaataacggttgctttccctacatcacttctattttttgctcgactggataaaacaacagccccttctaccccaataaatacccataaagttacaagcattgtacttttaacttggctgccaactgctccccatgaaaaagaaccagtttgcccccaaaatccatctaagaacgtatcaatatgaaacgcgaagattcctatgacaataaatacaaatacaggtactaattttgcgattgtagttactaaattcacaagtgctgctgattgaactccacgtaaaattaacatgtgaacacaccataataatacgcttgcaccaataatggacgctacattttgcccgccttcaaagattgggaagaaatatcctaatgaagaaaacaataatgtaccgtaagctacattcccaagccaagcagatagccagtatccccacgcactattaaatcccataaaattaccaaatcctgcttttgcatagctaaaaataccaccatctaaatctggccgttttacagttagattttgaaaagataatccaagtgcaatcatcccaattcctgttataacccagccaataataatggctccagcaccagcaccttttgccatatcactcgctaaattaaaggctccaccgccaatcatagacccaactacaagagccgttagtgtaaacaaccctaatttcttatcttcacccattccactcacctctcttaaattgcaataacaatacaaaagcaatagtgaatgatagtgtctaaaggaggagaaagaagaaaggaagactccctttcttctttactccatatttcctaaagtagctgccataaccgctttaattgtatgcattctattttcagcttgatcaaatacttttgaatgtttactgcggaatacttcgtcagttacctccatttctttcaacccatatttctcataaacttcttcgccatacatcgtttcaacatcatgaaatgcaggtaaacaatgtaagaaaatcacgttttcattccctgttgctttaatcattttcatatttacttgataaggtttcaataactcgacacgttcagcaaatttttcttcttcccccatagacacccatacatctgtataaattacatctgcattcgcaacagcttcttccacattacttgttatcattacctgttcattatatttttttgctaaatcaattacttcttgtgcaggccataaagattccggtgtacaaatacatacatccattccaacgattgctccaccaactagtaagctattagcaacattatttcgtccatcgccaacgtaaacgagcttcacatttttcaatttccctagatgttctctaattgttaataaatctgctagtgtttgtgttggatgccacatatctgttaatccattccaaaccggtacaccagaattttgtgctaaagattctacggtttcatgatgaaatccacgaaactcaattccgtcaaacatacgccctaacacttttgctgtatcctctacagattcttttttcccaagttgaatatcacctttccctaaatattcaggatttgcccctaaatctgtacatgctactgtaaatgcacaacgcgtacgagtagaagttttttcaaataaaagcgctacatttttaccttctaaataatgatgcggaataccatttttctttttctcttttaattctgctgccaaatctagaaaatataacaattcttcttgtgtaaaatctttttctgctagaaagcttcttccttttaaatttggtctagtcattaacataattcatccctactttctccgttatttatactaaatatctttacgaacaattggcatactcatgcaacgtggacccccacgaccacgagataattccgaacttagaacctcaatcacttctataccgtgttcccgtaataacgtattagatacatagttgcgatcatatgtaacaactacacctggcgcgattgctaatgtgttcgagccatcattccattgttcacgagcagaagcaattacatctcctcctccacatggaataagaactaattcacttaagcctaatacctcttttaatgcttccattaaagacgtacgatgtgtaattttaagagtttcctcatctgatcctttttctaaaatataaatattcatattcccttttggtccttgaatggctgggtgaattgtaaacttgtcatagtcaaccattgtaaatactgtatctaaatgcataaatgctcgacattttggaatttctattgctaacactttcttaattttattttgtcggctaaagagatttttagctaaacgttcaattgctttagctgaagtacgagcagatactccaatcgcaattgtttcttcatttaaaattagctcgtcgccaccttcaattggaaatttataatcacgatctaaccagattggtacattatgttttgcaaatcttggatgatatttaatgatgtactccatgaataatgattcacgtctacgcgctggttctctcatcttatttatcgttaagccatcgcccacgctagctgctggatcacgagtaaaatataaattaggcattggatctaagtaaaacggatagtgatcttccattaattcatataaatgtgtcttcttacttgtttcaatttcgtttttccgtacaccacccataattttttgaattaattcttcatttgaaaaggaaagtaaatattcttttaaagtttgatgtgcaacatttacgtcggcctgtccttcttttaaaatacgatcaacaaattcttctcgaagttttttatctactaacgcctcagcggctagtttttctaaataaagaacttcaacaccccgattgcgtaacgtttgtgcaaaataatcatgctctttttgaataattggtaagtatggaatatcgtcaaataataattgctgcaaataatctggcgtcaagttttccacttctttacccggtcgttttaataaaaccgtttgtaattccccaatttctgaagtaacatgtatcggatgtttcatttgttgtacctccttttaaatatgtttgatgtcttacaagtacataataaatgctctacactttcatctttgtgaaagtatccacattatcattgtgaaatattaaacaagttatttttttaaaatcatacgaatatgtatttttataacaaactatctcgctttctcaataaaaaatacatatattacgcatatatgttgaatatttaacttccgtatttaaacaaaaatcctgtttttaattttattaaaaacaggatttttgcatctaaataattaaatttaatctttcttctataatctccctatctgatttcgactgtgaaattataaggcatgtatcatttccgcatatacatcctattttttctttccaatctaactcatcaaataaaacaccaataacatgtgcattaccaggtaatgttttaataaccattaattgatctacacaatcaatttttacaaccacttctcgtaattttttctttaactttatatcagtttgtacatgctcttctgagaaaactttatatatcattaatccttcttgagaaggtaccttcgttaagtttaactcacgaatatcgcgagaaaccgtagcttgtgttactaatacatctttttttgctaacaattctactaatctttcttgcttatctatttcatactcctttacaaattgtttaattaaccgttgtcttttttcttttttcataaaagacaccccttttaatattatagctcgctataattttcatccgaaagggacagaaaagaatgttgcggaaacgttcatagtttaactgtaaatattaaatcaagctaaataaaaaagagaagaacagcattctgttcttccttttacattgaaaatcgttcaattgtttgtttcaagtcagttgcttgcttctctaaatcctttaataattgatcgattactatcatatttttagactgttgtagcgtcacacgcgccacttcttgcgaaccagctgacgtttcttcagcaattgctgctacagcttttgtttgtgctcctgtttgatgaatgtggctcacttgttcattcatataactactaatttgctgagttgcatcggctacttccataacacttgatgacatttcttttaaaattaattccgtagcttccccacgtttcgcctcttctttagctattttcacttgttctgtcattttcattgcaacttgttgtacttcatcttgcatattccgtaataactgcgatatgtttcttgcagaatgatcactttcatcagcaagtttccgtacttcttccgcaacaaccgcaaagcctcttccatgctctcctgcgcgagctgcctcaatagaagcatttagtgctaataaattcgtttggctagcaatcgcactcacaacagacacaatatgttctacttgtttcattcgttcttctaacttctgtacattttgcattgaatcttcattttcttttgccaatgtttgaataccttgaattaaagacgtaaagacacgagtactatgccctaaagcttcaaccatttctgaagacaatgtatcagactgcttcgctttttcttctacttcacttgcaatagaagtcgttgtatcaacagcagaaacaattgcttgaattgatgccgctgattgctcagcgcctgaagaaatttctgcaagtgtctcagatacaccttgcgcttgtctcgttgcttcgcctgtttgttttctaatctgctgtacttgattatttgtatacgaaaatgttgtatcaatattttttaccatgccccttaagtttcctaacatcatattaaatgcaacacttaaagatttaatttcatcatctgtcttcggtaatggaacatcttcacgaatatcaccctcagctgcttttcttgccgcctcctctaacttgcgaagcggtttaattaaaaatacggctgctccatatgctaaaattccagaccatactacccctaataacataacgataatattatatacagtttgacttacataactttgaaaataatcgtatatcacgtaaataaaaaagatacttgttgaatatgtaatgaaagctaaaactgtagtgaatagcataagttgtgtacgtaatccaaaagaaaatgttttcctttctttttccatcttccctttccccctttttataagcaatataaatactacctatatattattatccatattttcattatagaaggatatagagattttaaaaaaatattatttctttgaatatcaaattgcacgaaaaaaataaaggattctgacaatttatgactaataacagaaataaggggcaacatttgtaaaatatatttttaactgggggttttgtatgattcaagttcgaaatctagtaaaatcattcggttcacttgatgtgttaaaaggaattgatttagaagtaaaagaaaaagaagttgttgttttaattggtgccagtggttctggtaaaagtacattacttcgctgtcttaactttttagaaatgtacgatgaaggcgaaattcacttacaaggtgagcgaattgatccaaagcattcaaatttaaataaagtccgtgaaaatgtcggtatggtttttcagcactttaacctctttcctcatatgacctcactagaaaacatcatagaagcacctattcacgtaaaaaaattagagaaagcaaatgcaaaggatattggaactcaacttctccaaaaagtcggccttcaagataaagcagatgtaactcctcatcttctttcaggtggtcaaaaacagcgcattgccattgcacgagctcttgcaatgagccctaagattatgctatttgatgagcctacctcagctttagaccctgaacttgttggagaagtattgcaagttatgaaagaacttgctgaagaagggatgacaatggttattgttactcatgaaatgaattttgcaagagatgtagctgatcgcgtcatctttatggatgatggaaagattgtagaagatgctccgccagcacaattcttttcagctccatcacatgaacgggcaaaacaatttttacgcaacgttttataatgtaacttttgtttcgaacgaaaaacaatacattcatacggtgcacaactaatcatctaaataaaatatttcaataacatactaaaaaaccatccgtatgatcaatatataggaggggttttatgaaaagaaaactattaaccattgttgcgagcattacactatgtacatctttcatactaggagcttgtagcaaagaaagctctactacttcaacaaatggtgaaaaagaatttcgctatgcgatgagtggattatacaaaccttttaactataaagaaaatgacagcaaacttgtcggttttgatgtagaaatcggtgaagctcttgctaaaaagatgaacatgaaggctacgccagttacaaacccatgggaaacgctgattcaaggtcttcaagcgaagaaatatgatgtaatactgggtagtatggcaattacagaggagcgcttaaaagctgttagtttctcaaatccgtactatcgctctggcgcccaaatttttgtagctaaaaagaataacgctatctcttctccagaagatttaaaaggtaagaaaattggtgttgtaaaagctagtacctttaaaaatcttgttgcaaaatatacagatcaaatcacagaatatgacagcgatattactgctcttatggatttagagcctgggcgtgttgatgcagtaattacggatcaaatggttggtctacgtatgataaaagaaggaaaatcgaatataaaagaagccggaaaaccattaaatcttgatgaaatgggaattgctattcgcaaagatgataaagaaatggttgagaaagtaaataaagcgttagatgaaatcattaaagatggtacgtatgaaaaaatcagtaaaaaatggttcgggcgtaatattctcggtgaagaggaaaaaacgaagtaagttagccattcaaaagattcataaacagtgccccactgattaaatgttcattttatgtggggcatttcattctctactaaaatctatacaatatgaggtgaaacacatgtttgaaatttttatctctacctatcccacactcttaaaggctactattgtcacattacaattaacattaacctccctagtactcggttcattaattggattattatttgctttctttcgaatctcgaataacaaagttttaaatagcattgctcatatctatattgctattattcgtggtacacctttaatcgttcaaatcgcaattctctattttggcattacatctgtcattgttttctcccctttttgggcaggagcaatcgctttagcaattcataacggtgcatatattacggaaattttccgaggatccattcaatccgtcgaccggggacaattggaagccgctcgctccttaggtatgccttaccctttagctatgcgccggattatattaccacaagcatttcgtctgtctcttcctcctctaggaaaccaatttattatcggattaaaagactcttcactcgtcgcttacgtaggactgtccgaattatggggatcaggtttatcaattgcagcaggtaacttccaacaattagatacttacataatcgttggtgtatactatctcgtacttgttcttctatttacttattttgttaatcttttagaaaaacgactacaacgaaaagaaactaactccgtccaattccataaaaagaacaaaaaggaagtttctttataagaaaaagcaagcctgagatggcttgctttttcattgcaaaaatatattaatttttactgatttacttttttaatactcttttcttcctctatatgttcctcacgatatgaaatattatgaggatctagtccatttcctaaagaaccatagaaatgctctctatgcggatcaactaattcacttccttgataatacacgcgtggtgtattccatagcgctgccaaagcttttgtcatcggcatctcatgatagcgttccggccacatttctttaatcttctcttttactaacgggtagtatttagaactcatagcaggaaacagatgatgttctgtatgatatgagaaattgaagtgtaaaacgtctacccagcgcggcactgttactgacaaacagtttgctaacggatcatttactggaacaattggatttaagcggtgatttgttgcgatatatgccattacaataaagttagcaattaacaacggaatgacatatgcaaataaccattttccaggtcccataataaacaataaactaatccaaactgtccaaggcaaaagaagttgaagccatacagatttttgattggatgacttgaactcttttataaaatgaaagaacattcgagtcgaatgcaatgtaaattgaattgttagtgacagaaaactaaagaatgaacgtacatgtaaaggcatacgatatacccaactcaaaaacttactcttcttaagtttctcaagtgtcggccatgcatccggatcattctcttcatgctgtgtatgaacatgatgcgttgcattatgccactttctccaaagctttggccctgttgataatggcataaatgcaatcgcgcctaagaagtcacgaagccatgcctttcttacaacagttccatgtaaaatttcatgccctaaaaatccaagtgaagcaaaacataatccaagaacaatcgcaattcctagattcgcccacacattcaattcaaatacaccaatcgatattaaccccgccaatgccacaagcaaataagccagtccaccaaataaacgagtaggcactggtttaaatgcttttttcggcaaatgtggtgatacacgtgctgcataccacccaaacgtatgaagctccttcatccttttgctcctttcttatgccgcgccttgcgcaacttacatatatcaattcttgcttccagattgattttactagatgatccaaaaagcatctattataaggaaaatatactcactctatcgtcacttatttttcgcttttattatcaatgaaaaacatttctctttttactctctatcaacctttccacatgatgaatcataacaatagaatttctatattgtcaacaccttttatgacctagtaataaaaggtggttatatttttataatcatactttatttcactaaagaaaatgtatagattccataaggatttacccactatatatagacattttcttaaacgtcatagactctatctcattcaataactccctatgtaatcaacaaacagaatcacttgaatttagttttatataaatcctaccacttcataatgccccatctaattaattatattaaaataatttataacctcttttaataaaaatagactacttctaaaacaacacacatgaatttcatatattatggaaatattaaaaggaaaattgttctaaaatcaggaggtttccgcaatgacaagtgatacatttccacaactgccgctatcttattggattgaatctactcagtttcctactttccctcgtttatccgaaaatataaagacgaaagttgctattatcggtgctggtattacaggtattactactgcctatttacttgcaaaagaaggcatcgatgttgttttaattgattctggtcgtattttaaacggaacgactgggcatacaacagcgaaagtaacagcacaacatgatcttatttatgatgaattaataaaccatttcggtgtagaaaaggccgggctttactatgaatcaaataatcaggctctacaattcataaatgaaactgttcaaacatataaaatcgactgtaatttctcaaatgaagattcatatttatatacaactaccgataacggattaagaaatttatcgaaagaatatgaagcttatcaaaaattaaatataccttgtgactatgttcaatctctatcgattcctattccagtacaatctgcgcttataatgaaaaatcaagcacaattccatccccttctttatttaaaaacacttttagaaaagtttgtggagatgggcggaaagctctacgaacaaacaacagctatggatgtggaaaagggagatcatccacaaataattacaaaagagggccatcatacatgcccatcaacttaagaatttgcactacccccaagtgtcaaaaaacgttattcttcatttcaattaatggaaaaccgtagagtttctatccttaagttgatgggcatgtgatactacccctactactattttttgaggcaagtttatgagttaataaaagatttatggcaatgtaatgcttcaaatattacaaggatgttctctaaaaactatgctttcgggcaatattatggttcaaattgtggcggacttataattcaaatcacaaaataaatcggatgctagaagaccaaaataaagttaatagaccaatactcactgatgatacaaaagaaagaatccaacgctctttacagcaatccttagaatacaatgaagaggtattcctctcttactacagaaagggatatttacatcaccaatacataacagtgacttctatagatccaggaaacaaattgattcattgtcttgatgcttttaatacacatacacaattaaaatttgatgaattaattgatattaaataaaaagaatgcatacacaatcgtacaatttattaagaagactccattctgaaaaaatttaatcaaaatggagtcttttgttagaaatattcatttgtttttttaaaatactgaaaataattaatgcaaaatagttatttaaaagagttaaacccctaacggtacgttaagaggctgtgattaacaaactcttactaaaaatacatgagattgatgaagaaatatgataattgatccctcgcattatagcactaaattaatttaaatttcaacttgataaattttcgtgtgcattcaatttattaaaatacgtattatccgttcaaacgatactaaaaatttaaaatggtataagcatatttatagacctgtcttttattgttcatataaaataaaaaagtacgaaataccctattttgtatgtgatcctgcaaggtaacttgtgggattttttattgtcattaaatcggagggattatatgggatactttaatgttgaattaatgaaagctgaaattactcaagaagaagctatatatagttacaaattatatacaaaggatagctgacaataaggcagataaattatatgctgccgaagtaattgagagagttcataatgaggatagctcaacgaaagatattgattttattatacgttgtcgtaaaatgctataaaacaaaaaggaactctgcaatattaaagagttccttttttatattgtattgaaaaaattttatgtttcttaaaaatgctcttagaatttcaggataaagtgagtaaaatgcatatgtagaaaggaggttttacaatatgcaaaatcaaacaaaaacttttcatttgaaaataaaatttttcggattcaaaataagtattaattattccttttaaaagaatctagcctgtttttatttgagtactaaaaggtaggatatctcttattcctatcttttagtttaacaccattattttcatgaatttttagactgtaacaattttattagatcctaaaatctctaaacttttctctaaaactttctcattatcaatgataataacatgcaatttttttctagctcttgtcatcatttgatagagcatttttgtattatcataatagtaatcttttttacttgttagtaaatttttattgtaaaaaaagttagaatctatcactacaattacattatcaaattcctgtccaataacctcatgtgcgcttttattatctccgttttgatacacttcatatggataatatttatttccgtaaccaggcgtataatttatagccttccatcccctatcagtcagttcttgaatataatccctcacactagtatgaccctcaaaatactgcacgctaatattagaataaatttgatgtgcattactttttgatgtatcaaacaaatttgtgataaaggaaataatctctttattggttctaattgtttttgtcaatggaaaatgtcttggagatacctcagcttttaaaaattcaggaatattattgctaacttcccaactagccagacattgattaggatcatatgaaaaaatacatttcacattgttatcattaatcctttgtaatatttcctctaattggtctttacgtatgcgttgaacttcgtctatgacaatcagatcatattcattaaaggtataactttcatagtatcttatacctgttacttcccaatcataaaacattagctttctatgcccagcatttacagttccacaatgaataataagtactcttttggagttatttatatattcttttgcaatatcatacgctaaaagagttttaccagttccagcagctccttcaattgcaatataggatggtcctccctcctgtcttaaatttataatctcagttttatagttatcttgatgttcagtcaaaaaatactgattctctagaaaggcttctgtagaattgaatggtgagactaaataattacagggatcaaactcttgatgtatgtcttcaatttcaattaatttttgtttatgtatttgtttaaataaaaattcaatatcactctctttaaattcttcattttcgtttaagtaataaagcttttcttctaaggcaacgtaagtgaactgtaaaactttcttttctaaaaaactgagataatatttattacttaaaagttgctttttcattctatccccagtattttttcttttcaattctatattaataatagtttcttctccaaatcttaaaagatcaaactctttattaatttggttaattttatatcctacataaaatccctctactatttttaaaatatttacaaatgatagaagctctttaactaaagaacttaaatcttcgatttcatcttttttaactttaatgtcaaaatgttctttatataattcaaatacggaaggtgatagcttttcacttgcatcaactagagacaataaatttataggtttcacatcaatctttcccctcaacttaaaataaatatctaaacactatcttattctattaataaaataccacatttaaatgaatctggtaaaaataacaaagtacacatataaaaagcaagtaaataaaatcccagtagttaatcaaaaaacagaatattcaatttttatttttccaataacaacatcaccttgaaattccgctaacatgttaagattatggaaatatatactaatagggtgaggggattaaatatgaatgtgcaaactgtctccaaaggagaaataacaaatctactaaacaattggtatcaatccatcatttcacaacatgtactaaaatccacaaatttcaagaaagaaattgatagcaagattcatcaaattgaagaagaccaaaatatacttatctattattcattactagattttagatataagttacttacccatgacgttaaaaactataaagatagtttagaaaagatagattgtatacctgatcaagcagacaccttcctaaaatattatcatagtttttttaaagcaatttattcaattaatataggagattacacatcagctaaagagcaatacgaagaagctgaaacattattaaaggatattccagatgaacttgaaatagctgaatttaattatatgtttggttctttccactatcatatttatcagccactaccagcaatcaaatatactacaaaggcaaaggaattattttcaaagcatgcagggtatgaaatcaaagttgctgcttgtaataacacactaggtcttgcttgtacttccctcggtcagtatgaaagtgcggaagaacacttccttgcagctttaaatactttcaacaaacacgacgaggataaactatcagcaaaagtgaaacataatttagggttattgtacgcagatcaaaacctttccgaactagcaataaaatacctaaatggatcacttgtaaataaccaaaaaacattgttcttattagcgcaggagtatttcaaattaaatgataaaaatgctgtcacgttgcatattaaaaatggattaaaaatttcaaacgaagagtataatcatcatttcaatattctaaaaggattaaatgacaatataagtacagatgaattggaagaaatcattttggcaggaatttgttattttaagaaagaagagttatggaaatacgtaaaagattattcagctattttaggcaataagttttacgattcaaaatcgtatgaaaaagcgagcaagtatctacacatgacaaatgaagctgataaaaaggcttcagagaaaggagctttaaaataatgaaaaaatctctattaatttttgctattatcacaggttttttatctttcagcttcagtaacaatacaaacttacaatctgtatcaaaagaaaaagtagattttgttcaatatgcacatggtgaaactatttaacacaatgaaatactacaaagttatgtcattacccctttacaatgcataacacaaataattattaacaaaataaaaagaacctatcatgtaggttctttttatttgctgtataaagttttataagaaatgctttaacgttaccttttcagaatacagtgattttcatatgtccttaaatttataacaataacttttctacacctacgccatccattaataacagtttcaaagaaggtgatattttaattgcttcttcgatatctaaatctccaaaatccaccatatataatccaaatccttcttttccatttgcatataatagcactttcccaccttcatcatcaccaattgcaagtgagttaggtatatatttttggatattatgagcttcattcatctctatacaatctgctggactccaaatacggatatatatttcattatttacattaatctctgcatctgtacaatgttgaattatctctagataatctgaaggaacatctattgatgaaaaaccttgtaactcttgaattgtttctttagttgctggaggttcttgtgtttctaaagtgaaaactgcatttaagttctcaagtatactcattaatactcaatcctttcatattttacttttaacttatcaagcattctatattgttgttctaaagttcctctaatagtttctttagaaaatcccgctttttcaaaatcagaaactatattctttaattccgcttgtaaagaagagctccattttccatttcctaaggctacacgttcatcacgtctcaagttctgcgcattagtaataatagtatgtggtaacccctttcctgtttcaatcgtcactgttggtgcaagttttggatcatatccatattgacttaaatttgcttccgcccatttcccttgtaaaccgtgatgagattgtaacttccctccatttggacctctcccttttggtttaggcattgattgtatatgcgttttattaaaaagtacataattcgattcagcaccctttacagttttaacagcactagctgacatctttacacctttaccgattttaaccaacttcccgattggtgtaataccggctaccgccatacctccagctatgactctgtcaaaagtaccaagtttctctcccgtagacggatctacaccttcccaagcacgccgaacatcatattctccacttatttcacctgtaatatctctggctaatttattaccatcaaattctttttttcctgatgctaatgaagtttcattgtttattgtttcttcttgatttaaatcgctatacacaattttatcagattcacgtgctttttcctctgtgattttttgaattgatgcagtccagttcatatttaaatcttgtatactgaatgttccactcgcaggactaaaacctttcccactttgaacttctgcaagaccttgagcaatactcgtagctaattgaagcgctgtatcaaaattactactagaaacataattaaattcatataaatgctctagtttttcttgaagcttttgtttcatcgtatcataaattcccaccataacttgcattcctggaagggtaatactagttccttcaatgtctgctttcattcggtcaatttctcgaatttgttctcgtatttcttgttcaatgacatctgttgtagcgacttgtgattgaaaatcgttcggaaaggaattattctgtcgaattaattcttcacacaaataaataattccttgagctaaaggatgaaatgtctgtgcaaagaatgtcttccctgtatcataagttttcccttgcaaaatagtatcgcccacaaaagcatcaattgaattaataacttgttccataccttgaatagtggctacacaaaaagcattcatactttctgtttgagcttgtacttctcccaaatacatgtttaaacccatgtactccccccttaataagtaaatgataccaactaaaggataaaattgtaaactatgattttattgatttttttgataattttaactataaaatccttaatgttatttcgccgccttgtatcctacaattaattccgcaacctatttttaaaacaatcgtagcacaaagtcaattacactctcccaaaaggtacacctttagatatagtatattctttgcagcttaaactacttcaaaaggtatcaaaatgtacttaagacacacttcataagtacacacactttttgagatgtgtttgttgaatgattttatgcttattggaggaggatagtgtccctatcagttggatacaccacagagaatccccttattgtgctgtttattgtttttaatatttaatctggtacatgaaattttacaattaagttattcctttgttttacttataaaattcctatagcattctatatgaattttgtggtattatagagatagaaaatttgtttccattgtttatactctattgtacgtagcgtgaaggacaaaccttacgccctgttaactcgggcgaggtttgtcctttttttttactttaaggaggaatttactatgaaaaaaatctacaaaattggagcaattgttactactttatgtgttgcttgtattgcgatctttactttaactaagaatgaatcagtcaatacagaaactataacaccagaaaaaacaattgtatctgctgcagatgtaaaaggatcacctgagaatataaaagatatttcaaaagaagaattaaagggaaaaatacaatcccatgaagagttcattgcgtattactatcaaccaacctgtcatttttgtaaaaaagctgcaccggatatcaatcgtatgtcaaaaaagcatgatagaaccatttatcgtattgatatctctacaccagaaaatcaaagtgcctttcaagagttcgacattccaggtactccagttgttgtagcttataacagaggtgaagaaattgaacgtctagaaggagcagtgtcagctgctacctatgatggattctttgcaagacgtaattcgagcgctagctagtatagtgctcgttttttctgtttaagaaaggagaattgacatgcaacaaaacgcccgtattcattcgttagacataataagaggtatagccatactatgtatcctatttgcgaatctacccactatgacgggactagatccctttaatcaagcgggttatatcggtacagataaagtgattcgttttttagtagatttgtttatacaggcaaagttctatactattttcgcattcttatttggagtaggattttacatttttatgaaaaatacagaagcaaaaggatatcccatgtataggctatttatccgaagactatgtatcttactactcttcggtttactccaattcacctttctatggtatggagatattctacatgcgtatgccttagctggatttattctattgttcttctataagcgatctactaggcttatttttatagctggttgcagtttcctaatggttagttatgtattacatatcattgtatttttgcgagcaagttcttctatttcagaagtgcccaattactatcaatatatgtttacaggtaacactaccaatcacactgtaaatctatttatacattattctcatcaaataaaagcacgtcttttctttctaatgactcaggaattccagcaactactaataggaattccggaatatataggcttatttttaatagggttatgggctggtaagaaaaatatttttaaaagggtaccggaattaataaagaaaattagatttttacagtggagttcgttatgtatctcatgccttctctcttatcctattatctactactttataaaaacagatgtctattactctcaggatgtacaactatggattctatttggagggaaaatgctagctatattctatatttgtactctactgagagtttgtgagaataaaaaatatatagaatgcctgcacccctttatgaacgttggccagtatgctttaacgaattacatcactcaaagcatacttacgcttgtcattctttcgtggtgctttaaagatgtctcacacgtatattactggcaattatgtatctttgggcttttaattatttttgtacaaattatattcagcaagatttggagtaaatatttccgttatggtcctattgagtgggtatggagaaaaggagtttacaagaaataggggcactatatcattctgatcctattaaacattaaataaaaaagtgcaaaatctatcaacagatttcgcaccaaaaacagataaaaaatacaatcactagaaacataggagagtgtttcaccacttattataaaccatatctttacatttttgtgttgtaattttaaaatatgtaaagattcaatattttgttttaaattttctttttatttaagttatactaaactacaaaggaacaactctcctttaggccgtcaaacattatgctaacaaaacacacaccaaaaaaaccaattcccgtgtaatggaattggtttttttggtgtgcaattcagtcaatacagcaacttgaacccacattttcaaatgtagtcttattaatcttaccataattttaaaattcttaaacaaaaaaactaaatcactagtaagttacgtgaatccgctgctttttcatcaagaaatctggagtataacaacaattaagttcatactagcatgaacaacaaatgatactagtaacctattagtacgcatatatactacagctagtataactccaattaaaaaatacccaaatataaatggaaaatcaaaatgcatgatagaaaagaacaatgcgcttattagtatgctccaagttttcttaaacttagacattaaaatgtttatggccgcataacgaaaaacaaactcttctactaaaggtgcaagaagaacaattgaaacaagtgccacaggagatattgctgctgcagcgactgtactagacgtatttgctgattgcgtagttagctggaatacacccttatctaacacgctaccaaccatctgcgcaagaaatacgaatatgatcccaactaaagtccatatgaatgaatttcttgataatttaatcgaaaactttggatcatttattatttctttactatatataagaaaaatgattatcagcataagtgaaaacccaattagttcccaatgcacaagaagttgttgaattgcttgctgttggtttccctgaatatcataccagcccgtcttcgctagcaattgtacacctataatcccaacaaattgagtcattacaaaataaatgagtatgatataacctgatttatgtatattactattattcatgttaatgtattcgcctttcacttttttatttaattaacgattttgtttttaataacgaactttcattggatccagtgatgtttttcgttcgtcttttttataaaattttcatgttatttttgtaaagccatttcattttcttttttaacacgttttcgattacaccagtagcaaagattgggacccttatgattcattgatggtctatataaagttttaactggcttgctgcattttgggcatttttgtttatcatatttcacgatttcattcccctctcaaataaaaattttgtttagttcttgcagtcagctttttgctaacttcctttttatttacgatcgaagaatgataaaaattcactgtagctaaaaagttcaaattctcccgtgtcacttttaacagctatacctacatcctctggtgttctaaacatcttgaaatcttcatagttaaaccaatattctttatcaatactgaatcctcttaaattggcttttggtacgacgtacatccaatctctaagatttattagtaactcaattgaatcctgtaaaagatctagagtatcatccatatatattccccttttcccttaaataattattttgttttatttcatcgattttaaatatcagataaatcataaattgaagcatctatatgcttaataataaaaatgtcttttttagagtaactactatggttgctaaagctataaacatcaagagaaggaaaacgctctgtaagcatctttataagtaatgaacgattttgatgattgtcgattaaatccaatttttcactccgtcctttttcaaagtcggcaaattcaaatcccatttcacgtaaatattgaatgtgttcctctcggctccttttatctgttacaggagttttactgaaagaacgacaatgttctaacataaagctaagtttcactctcattccaccataggggtaatacttcgtatcatgcacatgattaaaaccttctgtattccaccattcactaacaacttcagaaagatgtttcaactgttcttttaaaccatcaactggtttatcggaacctaatttaccctgtaattcatgtatcttttgattcgcctttttaatctccgcataacgtttttctttttcttccaacagatatgattcgtaatttagtacttttgctgcttcactaaaatagctttctatcaatgatggaagtgtttttgacatttcgattgaaagtaaatctttactcacccattcacgtaattgagcattagcaaagtgcatatcctttaacaccttcagtaatacagatttttgatcctcattcaattccaatttcttttcgtccatttccccagctcctttattttcaaacaacgctttggttaattatgataatgattcttttgctattcgattcacatctttaacaattgcattatctactccatttgttattccttttattagttttaacgattcttggtatttttcgttacgtattttgtactctttatatgcctttgatgtttgctctaaattccacaaagcatttaaacgataattattaatgtcataagccaagctcagtaattcatttaattcagataaactaacctctaccacggtcttaccattctcaaaacgagattttccattagagagtttatttttaattgaatcaatcttttctttcataaacccacctacttctctacaaaattcatattttattacattaagtaattacaaatgaacactaaaaattatatataataattatataattaggtgcccatacagttatctcagactatctactaaaatcaagccgcttgcagatgctttaaacccatttctaatgcacctgttccaccaaatccctgattaaataatagtgggacatcatacttctttgcgtactcttttgctacatcaatagatacatggccacatgcacctttttgaatgacaataacatcgcatttttttataacacttcgaaacgttttctttacgcctccgtgatttttcccatcatggaaaataacctggcagtctctttttttggccaacttctctaacgttcttccatttgatccacctaaaactagaattgtactcattcccactcactctccttatctttcttctttatgtatgtacttggtgatgttaataacacaagtgtacaagcaacaatattcattaacacaaaacaaactattaataaaataatgaaaatcggggacaacaagataaaaataaagccacttaccaccaaacagatgaaaatgaagccattgctcatatcttcgtaaccatctagcccttttacaatatttaaactatgcatccatactgtgatactatcccaattttctattaacagatagccaccacccaacaaaaaagcccatccaagcaacgttcctaataatccagaatttcgtcctatataataccccgaaacaaaattcgcagctgttccaattaacattctcatttgtattcctccatatccatttcatttaacgttatatacaaatttcttttaaccatggttttattatatcagaaaattatgaatattcaataaatgtttttaggtactctttatttttttataaaagggttgtgtttttctccacaaccctcactttcttcttaatccacaggtacttcttcttgtccatgtggaatttgtgcaattggtgttacaatttgtgcatatttgtttacctgcactttaaattgtcgtggttctaagaagtttacctgttgaattaaaacttcaatatgaaacgtatctactttttttccacgatcaattttggtaatacgcgcattgtaaaattgatctccatttaggaaatacctttgaacagcttctgtagccagcatacgctcattacttgtcatcttcattggttcaataccaaatccagcctttgtaaacaaatacgggacatcataactactattagaaatttttcgtagtaaatcctctactgtttttgtctttgcgatatattcttcctcttttgtatcaaatccctttggcttatcaccaagcatctcgatttcatcttgatttacctgctcttcctcttgtacttgtgatttcatcatataacgatgaatcgtattataggtcgcaacgcctactactaacactataattaccaatataactaagtacttacgaggcagattcgctaacatattcatgactttcttcatatcatcacatcccatatcagtcgattacattacggacttgcgtcatatgttgtcctcttgccgtatagtttagacctgtaatttgtacacctttattatcaccaatatgaatcattttctgattccctaaataaatagatacatggttcggattttcatagaaaattaagtctcctggctgtgcacgaccgatatcgggcacctgttttccctgtccaatttgagcacctgtccaatcccctagttggacacctatactggttttaaacacgtattgtgtaaatcctgaacaatcagcactacctgcagctggatttctagcaccggatacatagctcactttcccttgcccaatccattttttcgcttcttccagtaccttttgtcgtttagcatttgtcattgtaggagaaccaccagatgataaccctggatcatcatttttcttaaagaatttcattggatctgttggttggtcattaatacgaatttggaaatctaaatggacagcgtatccattcatattaaggaaacctgtatctctatcaaagttagaaccgcccatttccccaataatttgcccttttgtcaccatagttcccggtgcaactgatattttactcaaatgtaagtaacgagatacaataccatttccatgatctacatagacacctagaccaccaccatttacatttcctgtttgggctgttacaatacctacttccattgaccatacagggtctccagcttttccggcggtcatggccccaatatcaactgcattatgttgctttccaccacgcactgcatcaaacgtatctgtaatacgacctgatttcgttggccatttccaacctttatcagaaatccattctccagatacatctgccacacaacctaaatctttgtaatattttaaaactttggaaacatatgtgtagagtaaacatccagcgccttattacattcctgtgataggtttccagaataacgttttttgacacttgggggtagtgcaaattcttaagttgatgggcatggggcggaccatacaaaatttgatttttaggtaaattcatatgtaccacatccttttgattttctgtgttattaaaatcaaaaccaattttcttctttatatctgtaagtaaactatcactattatcttctttttcatttagtcttgtacttacaccttcttgaagttttccatctagctcctgaaaaatctcttcttctatttcaactttaacaaattctttagcacgccatgttctcaagttttcaatgagtttctttccatttaaaccagctttattacacttttccacaattttatgtactaactgtttactaggcatttcccgataagttagtcgctcactgacaccagcttccttatatgacaaatctaccgacatattatccaacctaaaaacactttctgaattatcatttttaataaaaatagtaccttttttaataaaagctctttggaagtgaatctcatcatgatctaataaacgcttaattatctttcccatttcaatagcttactctaactctattttattttcggtagaaaattccttccccatatatgtatctaattgtttcatctctttgagaaattcaaaaggaagcataaatgatttatccgtagtattacgaccatgtgtatatcgataccccattacaggtcggttatatacctcttttacaattcctttatgcgtaaccattagtgcccctgtaatctttctctttaatatggagtcttttatgtcatttttaacctttgtccctacaacaatataaactgcatcccctatattttctttcatttgttcatattcattccctttttgttgatactttgtcttttttgcaagcgctcggggccaataaaaagtacctgcctttataaatgcttcaaattcttcgactgtgttagaaaaaaaagaaaatactctttccaattaaacctttccctattgcttatatttccaaaatatatcataacatttattcctaatatattaatacaattaacaaaaagtatgcttcctttagacctttttattaacaatttaaaaagaagattattagcaataaaccatttacattcaatcttattatgccattttctttcgcaatgtaggataccacaccatcgctatcaagttaccaaataaaaataccctcaaaacgcacagggccgtgaactaaaaggatctaacataataatttaccttataggtaatcactgttagatcctttcattacccaagatatttaaataataactcctcaggtttctttgtttatatgttttgaaaaaagttgaatgttaggtttttatagggttatttcttttaattactttaaaatcctccaaatggacctataacttctagctaattctccgtatgctctttagttttttcaaagagagaacgaattgcatcagattcaagtgtaaagatctgatgacttttctttggagtggatccctttcttaagattaggttataatcagaattataccttgttctagttttatcgaggtctttaaggtattttacatattgtgcctttttctcctcactaaagttaaacaattccccaatgtattctgtattcctaattaactcttcaaataggttctgatttcttgaatcaatgttaggattcgatagtaaaactgattctttaaaattaatagtatgctcttcggggaaaaaagatattttttcccctggacaacctaataacgcacatatttcttcttgtagctttttacgggatttctctgtgtaaccaataaaaaacaagtgtatattcttaaaggatctcatcttctctttaaaagtaatatgctgacttaattgaataggatagtatttttccttatcaacaagtttttgagcggtttcttcaaccaaatcacttgatagatagtaacgttttaaggcattgacagtttggctacctgagattccgatttcagataatattactaaatcataatctgaggtaggttctgttaaaactctcgattcaaactgatcaagtttcaattgtcttgtatgtggaaatccacttaaaactaatctgtggaacccgttatagtcctcagcggatttgatatgaaaaaatattttattcgtacatctaagagcagcttcaaccttcacaaagaatttttttatatcctcctctttaatatattgatggcttgcaattacatttagaagagcttgatgatattttgggtcaaatcttctaatccaagctattaagtcggcctcaatttcctttaattctctttcctcataaaaagattgttcctttattatgtcaactgctcgactaaagtacggagagtataaaatttctttctcgatttggatgttattgatgaaacagtctaaatttattaaatccttttctttttcatactttttatacaatttctccctaatatttatacaatcaagtgttttgctgataatgtcaggcataataaggagtaaatagccatcattagacttgtaagcaaaacaatactctgtattttctaatacattgacatcacttaatttaaatttctgcatcaaggaattaccttgttgaagttgatatatctttatgctgggccagtcttcttctggaatgacccaggtatcattgtctatatcaatcttaatttcatttaagttatcatcataatcaaaggtgcatttttttaatacatccacaatctgaagattttcttctactgatatatgggtagaaattaaatgctctaagaatcgaatctccttttcccatatctgttctaataaagtgaaatcataacagttaactgagctcatgatactattttttattgtttcaaaaacatgaccgatagagttagttttaatatcaacaggggtaaataaaagctttagtaaatcagagttttccttgtatagagaatgataatattctaggtaaagatagaaggatcttttctcttccccaagtgttttagttataatatcaattaaagatacaattgttttaaacttacacagttcaaaataaaaggcatcatctatttgatccttttccaagatagttaaaaatcttttcaaataaagtatttttaactctgcatcttcctgaatcttcttcggaaagaaatttgtatttatctcagatgtttttattgtataaggtttacccctgaataactcaatgttggtattaattttattaaagaaggttaaatgaaaattttttgtgttattctcaactacctcattttccgataatactaacttattatcataactagagaatggtattaacggaaaatacgtttctttattaattaaatcataatcacctaatatacttggaaacttttctttattttttataaactttttcttaaaaacaccaatactttcaaatactcttattatcttatcgatataagagtgaaagtctttttcgttgctcaataactgatgcagagatatataatcgtgtctgttgtatctgaaagttattgatacatactcaccgtctagccacttttcatcttttatttgaacttcctttaaataatcaaactctaaatccacaacttctttcctagaaattcgaactagtaactgattaccacgctgtagaacaattctatcattttcaataacattccgttgcccgatttttttatttggaaacattgaaacttctttttcattaataatccaattaataaattctaagttgtattttttttgaatattttctaatacattaatactttcttcattcagataatcggagatactttctgaatcttcttttgcttccatcaagaatagaacaattccagtgtggaaatgatcatataacttaagtgtatcaatattactattaccatctacgaagttatcatgaaccttgatagtcagtattgtgtttaagttatttcttgttaatggtttgagctttaaggtggaagttcttcttaaccaattgttgtaatctatattgatggtagggaaataggtatttacataagttattaaattttcccaaactcttttaatattagtgaaattttgctcagtcaatgttaatagacagcataagtgataatacttattgatagtcttcctgctgtctaaaaaatttgattcgaagtctttaggatcattagttcccatggactgattaatcttattaaaaaacatttcagaaactttaattataaattctgaagataaactattgtaaaaaattaaatcataagtattcaatatgaattctttgatgtcacgttctttctcaagagtattcagaatccgctcttctaggaattctggtatgactttttcgaatttgaaccttaaaacttttaatagagtttgatcgtgaacttttaatataaattcattttggacaaattcattttctaacaacattaaagacagtattaattctgtctcataattatttacctctgactttacaaactcatatattacattctttgtcttttctttgtcagtgtaattcttatagtatataacctcaagtaacgtgtttaggaaaactcctttgccaagtccttttagagctttggtgctttcaactaagttattgaaattattatttgttgaaaaataataacggaaatagtttctaaatagtgacccccggcctatctctaaattaaatagatagtgctcaagatttcttttttcctccaatagacgcttattattattaaaatgagtgaaataaaaactcaaattttcttcattgacttcaacaatggttggtttaaccattttgctgagtaggcgtgtagcttttttattaatgaaagatgaattggtttcttggctttttgaagagttatctataaagtacttgttatcattaaaataactttcaaagtcacttttagagttcttcacctgggaaataaggtgcttatcccaatttaaatgtaaatctaatgattctaaataagtttgtatcttgtctaaagtttctttagctttttcttcattttctagaattagaaccatgtcatcaacatatctaaagtaaaagttaaagttctcttcaagcagactttgtatgtatttatctaactcaattaaatagacttctgctaaatatctagcaaatgcggggccctgtggcacgcctttggcttccaaattatctttttcacaaagttttattaagtaatctatcaaatgattatatttactgagctgctcacttgagagtgtatttattttttctttaattatttctgagggtccatgaattaactttgtttttaatcttcctaaattaagacttgaatagaaatttttaatgtcaagttttattacgtaatgttccgcgagtatgtcatcgttaagcctttccataatattattccgatagattaaccattgttgcatccatggtttaaagatattgtagttagcaaaactattttcaaatttataaccgtaagatccatccgaaaattctgtataatagaaggcattaagtatttttataaggtatgtacttattattttttcttcagcttgaagtgcataaagacttcgaaccttactatttttttctaaacgggagaatttataaggttctcgtactgtatagttaccaacaagaacattttctatagcttctttcatatccttgacatcgatattttcaagttctaactgagtaaataagaatgcaatttcatcgttttggttagtatacttcctttgcgctttaataattttgtctatttctgatttctttacttcaaaagcatcgtaaggtaataaatcaacatcaagaaacttaagtggagatgttgtctttaattcgagaatatctttattttgaagactacaaccattttcacacttgcaattatgttgagagaacttatttcttaagaaaccacatgttggaggatgcaggttaagattctccaacttttttctggtaagttcaggtttgaaattatccattctagagaaaaagtcccaaagaatttctttcccatagttatcattttgaggggtcttcaatttattcagtagaccaacaaatattattctttcactctcacttaaattgtttggatatttctttaatatgtcatctataattgtacattgctttattttttttagaacatcctctagattttcatatgtctcttttaaggcattctttgttggtatgaatgggttagtttgtatagtaatctcttctgcttctaattttaaatttaactttaaggctacatctttaaaactttgcttttgataacgtgatagcaaagtaagttgagaagaaagaaactcttcatcaaatttatttttccatatttcagttgaatatacgaacgaataaatgttatctataaaataagaatagctctgagacttggtatgaagagataaaggcagtttcaccccaaatcctaccttattattgttattttgaccattcttaggaaaaagatcgacattgatataaggactcggattattattaatctcctcaactaacctctgtacaaactggaaagcatgtgatttttcaacaggttcagtgaatattacccaaacatgtatacctctattacctgaaaattctgtaagataatcaattttatatgaatcaagaaacttgcaaatttctcttacttcattgataagtatatcaatgtatttttgttgatctttaggaaagtccttttctagtatctttttatctatatcgaaatccaaacaaatccattttaacctagttttaacttgctgatatgtgagatagcttttctgattaattaacatatcatttattcgcaaaggatcaaaaatattattctttgtactatatttcccgttacttagttgttctgcaaaatacttcttattaatgacaaagttttcatatagttctgttgcaagactcttatataaatctctaatgtctactttaacgttcctagctagcaccgactattaacctcccacgatttcttttacttacttctctttaaaattttaacagaatgaagaattgtttgtaatagttataatggaaattctttcttcctaattttcaaaagtattaaaagacagtatttcattccataaaacataactgtacgagagctttattaatatgaagtgtctgttttaaaaagtgaggttggttttcaggagtattttagttaaagtataaaatatggactttattctgattctactaactttattgcaaagatacattattttagatttcttatcttttctaaaaattcccttagtcttctgttttcacctttcaattcgctcatttcgactaactgaataattaaattttgtttatcttctttgagcttttttatctcttcatataaccgctttattttatcttttgatgcatcagcaggtacaccttttccagtttctttgtatgcctgggaaatgattgaatacaaagcgagatcaatcaatcgttttgttaattagaattgcttgtgcttaatttggatagatacgaaacttatagactttattaattatcatttgattcacctccatttcggtatatgaccactatctaccgaacgtatattcgatatatagcgaagtaacactttaagtatgtcgaacaattaagatggctccttgccatcccttgttcaaagccaattcatctcccacctactcacttcgcgttccttgaggaaggagtcttcttggctaaaatgataaacttatacctacaatatctccttaatatatatttctttttccttttatataaactccaataacctctaaaaatatataattttagacataaatttacttataacgatcttatttatttaaattttctgtatttttatataaaacatatccaaattctgttattattaatacatatactgtaataggatgaggagaatacaatggatactttagtcacagaatatgaagtagtcgctaatatgttaaatgattggtatattgaaatccgtgcgagacgaattgataatgctcatcagctaaaagaagaaattgataatagaatgaaaggtgtctcggatcagagcttacacttatattattcactattagattttcgttataaatatatagtagataatttaaatatttcaaagggttgcttcgacaaagtagaaacttttcaaattccaaatgataatatattaacctactactatcacttctttaaagcaattcatgcaagtaccgtaggcagctattcaatagcaagagatcattatgataaggcagaagaacttctaaatgaggtatctgatgaaattgagcaggctgagttttactataaaattggtgccttccattacgatgtttacgaatcactccaatcaattaagtatgttaacaaagctaaagaaatattctcaaaacatgaaggccacgaacgaaatattggattctgtgaaaatcttttaggcatggcatgtaccaatttaagagaatgggcattagcggaagaacatcttgtaaaagcaatggatctgttccaaaaaattggagaagaaaaattcactataatggttcgtcataatttaggtttattatatgcagggcaaaatatgtctgaattagctattcgctacctctctgaagtatccgagaagaaacctaaccactataaagccattttcatcgagggcagggaacactctaaactaggaaaccaagaaactgctaatactttatttgaaagaggattacaactctgtacagaactaaacaatgaagaatatcagcatcggtttaaaattttgagagacattaataataatatcccagctgaaaaattagaagctacagttcttgcaggaatcgaatactttgaacgagaagatttatatgagtatatctatgaatgctgtaatgttctagcagaaaggatttttgaacaagggcagcatgccaaagcaggtacatacttctataaagcaattcaagctaagaaaaaagccgacgcgaaaggagctttaaaatgaaaaaactaattaaagtgatgagtattgctactgctttactatttacattgggaattacatctcaaacagatagtcacgtagtaaaagtcgttcaaagtatgatggcagacggagaccacggtggttgatattccttgacccagaatatattcctgggtctttttttattgaaacaagatataaatcgtcagttttaactatatagttgagaaggaatgcttataaaaagaaggaagtattatctacataagagacggagtttataaccaaaagattcatgtcactcattctggtgcctcaggagcacccattacttttcaaaacttccagaataaaaaggtcattttcgttgattctaaagtcaaaatagataataatagatttatttacaatagaagataaaaattatattcaagtaaatcgattagagttttacaatctaaaatcaactaaagttaacgaaccccctattgatattagaaataattatatcaataccattgaaacaactttaaagaatggaaacacatatgatatcgctgtctatggtacttcatctagtgtaaaaataattcaagtgatagtttcattgatatttgtaaataacgaatttatagcatctgtaactcaagacaaaaatgttaaagggatctttaacatttttaattaaatgaacaaagttttatcattaggagttgcaattaaagatttacccggaccaattgtgggtttattacatatataattacaaccttttaatcttatagaagctttatctcacgaaaaaatataaatataaaataaaaagccctctattgtaaggggcttttacacttcaaataggttttccttcaaataaagaataacagttaatacgttttgtttccattatttttaattagaccaatatcaaccaataactgatgatttgtacgatctacgaacaaaatattttctcatagaatacttatcccagttactagttatctattaagaaatatagaatacatcaattaattttaaccttgtccaacaattactgtaattgtatgatctaatacaccatttctataaacatatacttttgctgttgtggaaaaataagttgttaatttcccagtagaagaaacctttattaaatcattactagtacgataagtcattcctggctcatgataagtaagttgatatccattaaaaaatgttggtaaagtaactgtgtaatccctaatgttgagagtttgtgttaattttttctggtcttccctattaaaatcagtggaagcctgtgaacctgtggttccgatacctaaaatacttagaaaagcaaccgacgttacaagagcataacgaagtttcataatattaactcctccctttataaatgatttaaataacaatagggatttattaccctactagcaagataacatgaaatatatgtaaataaaaccatttgaatgggaattttctgtgaacatatattttatcaacaattgtacataaaaattaattattgactatcctataaaaaaaattaccaacaatttcttaagatatattaattttatttaataacgcgctccttcatcagaataaaaaagtttatcttcttttattaattatttgaaaatctcattaggtatattatattgatccagaaaatcactttcttgtacttaaccttccctattcaccttgttgaatagggagattaatctcttttaaaaatctcgatcttttagaaggtttcccattaattgttgctgggaatgtaatatatagattcttctttggacgagttacagcaaatggtgataggtaaccctttgaattaatctccaagttttcccccaccccgcaccgtacgtgcgactttcatcgcatacggcgctccatcttcttatatattctttacaactgttatataaaaagacttgagaccttccctccgccacttattatcatggtttcattggtactacatctctactgccatctctactcacaatcctttttaccagattattactagacgttagagacttcaaacgttccgatattgctaggtaaataactatacttaggttctacctttaccccgaattcacgttatttaaactaaagcaacccattagctttatccatcaaaatctgtacgataatttctttggagtgaatttttttattttatacatttctatataaagcttttcgaggtgtacattcagtagttcgtcatcaattatgttgaatactaaccatatatagctccctgcccgcattactttcgcagtgttgtttaacctttcctcagcattatctgttagggctactcaatgcgtcttcacccagcttcatacaaaaccgttaccagttatgcatgtgggagtatcagcagccatcttatcataggatttttttaaaggcatcctactgtggtctcacaatatcagttatcattataaaaatttataatgtggtttatccctcgttaagcgatttcaaaccaacgtttcgcaccatacattaagcgcctttcttcttctatagtagtcggtggttcagctttctctatggattcctggattatttctggagtaacttttgtggcttttttacttggtaatccttcatcatataagcctattaaaaatacatttttaaatgataatcctttactcttatgtatagttaataaataaattgcattaaatgtacctttatggtattcatctaactttttcttcatctcttcttttttttggtttaactcttgataccttttgaccataccttcccatgattgaaactgttctgtttctttttctatccattttatttcatcttttgttaactggtttctaacgagtggaaattctaaaaaatttttaataatattttccatagatactgacttcttattctttaatcgtactaactcctcaaagtaatcaataatctctttttttctatccaaagatttatttccacaaataaaatcagcaattttttgtggatttaaatatgatgaactatctccaataaagttaacaacttcttgttttttcttgtagaatgcatatgaagtttctgcaattatttggttccatcgagttaatttatcactatcttcattagatattaaaaaagctttccaatatctatatgcccttttaaatgcatccaagctaaaaatacccattaagtcgtcattagtttctattacaaaagggatattattaacctccagtttatggagtaatgttttaatttgggaagtggaacgatataaaattacactttctctataatctgggacagctttatttcctgataaaccaatatactgagattgatctataatccattcagcttcttcctctggagtaggtaaacttcgaatatagcaatcaccctcatttttatgaaaaggtttcattgatttttttatcctattgttctcattaaatgcaattacccgattcccagcttgaactatttttgaagtagaacgataatttgtcataagtttaagagtttgggtttcatacatttggttgaaatcttttatgtattttggctctgcgcctctaaaataatagatactctgatcatcatcaccaacaatgattaatttagctccgtccttcaaatctggtgggcaaataagtttaatgatatccatttgaagaggattagtatcttgaaactcatcaataaatatatactgaaatcttttttgtacatattcacgcgcttgaatatcatcttttaaaacatgaagcaaatttaacatgtaatcgtcaaaaactacaattttattactttttcgtttatcataaaattcccgcatcatcttttgaaatctttgacttaaagtttcatcacttgttggttcaagcacattaaaatgcttctctatatattttgtcatcatctctatggagaatcccatattcgtccaataacttattttttcaaataaatttttctctccagcattttcatctaattttttcaaattataatctctaattaatttatttaattctttcttatagctgctctcatccggattatctccaataatgcccatttgctctacatatggaaattgcttttttaattcattatacaggcgtataaaaaagctatgaaaggtcccaactgctactttagatttttcctcgtctaagaaaaaattcactctttctttcatctcttcagatgcttttttcgtgaacgtaatcatggctattttttcctcagggacattcttcatcagtattagatatgcagttttcgcacaaattgtctgtgtttttccacttccagcacccgcaataattctaagattcttttccatatcatatctaatagcctcaatttgctcattattaaaatcattattatcatttttaggctttaaaaaatcaaaaaaacctttatcttcatcatactcagaaagaacatgttgctctttcccttcatcatactcaagttctccataaataccttgataaagattcataactttttcagcatgcactgattcttttattttggtattaatagaatttttagcatgttcaagctctactatacttctatctaatgttttatctaatattttcttctcttcttttaacttttcattacttgcatataaattttttaatgaattatttttttccttaagttccctttctaaaacttttattttttcttggaatagttctattttataaatgctaacttaaatatgtacattaacgcttgaataaatatgtacattttcggtccagtggcaccagtagcgcctgtgttaccttgaacaccttgaggtccagtaggtccaggaggcccgccagaaggtccagtaggtccggtaactcctataccagtagcacccgtgttaccttgaggtccagtggcaccggtagcgccagtagcgcccgtattacctcgaggcgcctgtgttaccttgaggcccagtggcaccggtagcgccagtagcgcccgtgttaccttgaggtccagtggcaccagtagcgcccgtgttaccttgaggtccagtagcgccagtagcgcccgtgttacctcgaggtccagtggcaccggtagcgccagtagcgcccgtgttacctcgaggcccagtagcgccggtagcgcccgtgttacctcgaggcccagtggcaccagtagcgcctgctggtccagtaggtccggtaggtccttgaatgaacgaagcagaattaactagagcagtttgtaatgctgctattaatttaaggagctcttgaagtgtgcaagggtcaattcggaataattttgtaatgtatagtaaatagttaatgagattttgaagctcaataaatacagcgcttgctacaaaggttggatttcttaatatagttattaagtttttaataatagctaacccttgtgctttcagggaggaagtagcgtctagtgaacaaataaatttactcagtaggttcaatgtatcgattaggtcttcaatattttggggagatggatttgcgaaaagttttgggattatttttgttaaatcaataataatcgcacgaaatgttctaagttgagctttagtaattgggattgatggagtattcgggattcgtccggcgctacttggaaagcatggtttggagaatttgttttgattgtcgttataacgagacattaaatctctcctttctcacgaaaatgtgaacgaaactcatcatagtagatgcagaaattagttaaatggtcatagtaaaatcgtttgtttaaagaaaaaatagaaaaaacgccttacaataaggcgttttttctattttctgcgtattgataatatcgctttaaggaaatttttgatttgaatccagcgagttttataatttctgattcaggagtttctttttttattaagtttaaaatataggtgttacgaaaatgttgtcctgaaattcctttacgtaaattggctctagccacttcgaggcgaatcattttttgtatagcaatttccgttaatgcctttggtgcatcattttcatatacccacctgtatgttccacggttaaaatcgaatgcgacaaataatggatcatcactatggtatttaggacgaactggttctgggatgcttttgtaataattatatagttgttttttgtcttcttttgctaatgtaattgttctttctacacctgcggttgctgggattgataatgtattagtttcaaagtgaacgtgatgcattgttaatgctgtaagttcctgtaaggataaaccgtagtcaatcaatagatttaaaatagcaatattgcgatccattaataaggggcgcacaggaagttgtttttctgaaagtccttctaatgaagtgactatatactttaaccttttttcttcatcaggtgaaatgaaatcttcgttacgaagtgtacggtctggttgaatagatatttccatattcttcaatggattaggaatgtttagaaaatgatgcattctatttagtacaataaatacacgatgcatcgttttttctgagtaatgtcgattcgtttttaaatcggaaaagtaatcttcgtagtcttttgtacaaagtgtagcccatatattactggaagggagctttttgtttttttctaaccaatgtccgaagtcttcaatgtcataaacataacgtttaatagttgagggttttcggcctttattcaataaaaaaatagaaaaggcttgtattgtatcatggaattccgttgtctccatagtcccaccaccttaattatttcttatattatagcaaacttttctgaaaataggcatttacaagggggacaggaataataatatttggtgagtggataaaatgaggtgattgtatggaacaatcgatgcgaaagaaaaacaacaatcaaattaatattgtgttaaaccatcgaaagaaaatttctttgccagccgcagaaaataaaacggtaatttcaaatgaaactgcaattaaacatgaaatgctgcagagaattgaagaagagatggggaagcttgttgggatggaggatataaaaaagataataaaagaaatatatgcttggatttatgtgaataaaaaaagacaagaaaagggattgaagtcagagaagcaagtacttcatatgctgtttaaagggaatccaggtacagggaagacaactgttgctagaatgataggaaaattgctgtttgagatgaatattctatcgaaaggccacttggttgaagctgaacgtgctgatcttgtaggagagtacatcggccatacagcccaaaaaacaagagatttaataaaaaaagcaatgggaggtattttgtttattgatgaggcgtattctttagctcgaggaggagagaaggactttggaaaagaagcaattgatacgcttgtaaaacatatggaagataaacaacatggttttgtattgattttagctggatattcaagagagatgaatcactttctttcattaaatccagggcttcaatctcgttttccatttattattgagtttgcggattactcggtaaatcagctattggaaattgggaagagaatgtatgaagatcgtgaatatcagttatcaaaagaagctgaatggaaatttagggatcatttacatgcggtgaagtattcgtcgcaaattacatcgtttagtaatgggcgatatgtacggaatattgttgaaaaatcaattcgtacacaggcgatgcggttgttgcaagaagatgcgtatgataaaaatgatttaattggaatatcgagtatggatttgatgctcgaagaggagacgcacagtacataaactgtgcgtcaatttttgtgtataagttcgtttactctttttttgctttttcttggtgtgttttatggaagtgttccattttagcgctcttttcgtgtgctgaattaggatcgtgtccaaattgatttactgagcttttttgagctcctttattaacgtggtttgtcatttgtattcacctcactttaaaaattagtataaacattatataaagaaaaaatcgttagaaaagaaaaacctctttacgatatgtaaagaggttagattgctatttatgcattgaacgttctttcgtttcgatacgtctgtgcggtaaatgccatttgtaatgaatagaaaccatgcggaagcaaacaattaaaatgaatagaatgtaaagagcccaatcgctaacaataatttgagctccaattaagaaacctgctaaaattgtccaaaaggcatatacttcagctcgaagaacgagaggttttctgcgggctaaaagatcgcgaatgataccgccgccgataccagttaaaacagctgctacaattgtggcgctaattggtaaatttaatttttgggcatataatgctccttgtacagcaaatgccgataagccgatagcgtcagtgatattttcccactttttccaatgtctaattaacttatttggaaaaagaaaaataatagtcattgataaaagtgcgatttggaataacatgtcttgttgccaaaacgcgacaatcggataaccgattaataaattacgaagggcacctcccccaaatgcggttgccattcctaaaatatacaccccgaaaatatcataatcctcttccattgcaacaatggctccgcttagtgcgaaagcgattgtgcctatgatgctaaaaatctcccatgccatgaattttctcccccgctaactagatgaaatgtgcttcctctgctattatattagaaggtttaaatttcgaaaaggatgagtgaacatatttgatggaagaaaaagaaaaagtcatattagtaggctgtcaattgccacaagatgatgatgaaaaatttatgcattccatgaaagagcttgcatcactagcgaagactgcacgagcagaattgttagtgtcaacaacgcaaaaacgaccaaagtttcatccggcaacttacataggtaaagggaaattagaagagcttacaatgttaactgaagagttagagccggatgttattgtatttaataatgaattaacgccgagtcaaattcggaatttatcctcagtattagatgcgagagtaattgatcgaacgcaactaatactggatatttttgcgcaacgtgcgaagtcgagggaaggtaagcttcaagtagaattagctcagttgcaatatacaatgccgcgtcttatggggcaaggattgtccttatcgcgtcttggtggtggtattggaacaagaggaccgggtgagacgaaattagagacggatcgtcgtcatattcgatcgcgtattgatgaaataaagaaacaacttgcagttgttgtggaacatcgaaaaagatatcgtgagagaagaaaagataataaagtatttcaagtgtcattaatagggtatacaaatgcagggaaatcgacactgtttaatagattaacggaagctgatacgtttgaagaaaaccttctgtttgcaacattagacccaacgacaaggaagatgccgttaccttctggttatacagtattactaactgatactgttggttttatacaaggtttacctacttcattaatcgctgcttttcgttcaacactggaagaagcgggggaagcagatgtcattttacatgtagttgattccgcggatcctaactacatagggcatgaaaaaacagtaaaaagattattatcagaacttgaaattaaccatattcctgttattacgttatataataaaaaagatgaattacatcaaaactttattccgtttccgaaaagtgatttcttaatgactagtgcttttgaaaaaagtgatttattgcgtataaaagaagcgatagaaacgaagatgaagaaagaaatggatcgttatcgagtggaaatccctccgagtgaaggtaagttgttaacgcttttaaagacggaaactctattagcaaagatggagtttctagaagataaatttgtatatgattgtgcagggtatatttttactcattcgtcgcttaatgtgcaattaaagagatttttagtggaagaaggagaaaataaaaatgtttgatcgtttgaaaaatggagaaaaaattgctccaatcgtaaaagaagtagagagtcagattacagaagtacataaacgtgcggatgaagtaattgaaagcaatcagtttcgtgtattagaaagttttcgtaaacataaaattagtgactcgcattttatcccgacaacaggttatggttatgatgatattggccgtgatacgttagaaaaagtgtatgctgatgtatttggggcggaagctggacttgttcgtccgcaaattatttcaggtactcacgctatctctacagcgttatttggtattttacgcccgggagatgagttattgtatatcactgggaaaccgtatgatacgttagaggaaattgttggtgtgcgtgggaaaggtgtaggttcatttaaagaatataatatcggttacaatgcagttccgctaactgaagctgggcttgttgattttgaggctgttgcagcagcgattcataataatacgaaaatgatcggtattcagcgctcgaaaggttatgctactcgtccatcgtttactatttctcaaattaaagagatgatcgcgtttgttaaagaaattaaacctgatgttgttgtgtttgtagataactgttatggcgagtttattgaagagcaagagccatgtcatgttggtgcagatttaatggcgggttcgcttattaaaaacccgggcggcggaattgttaaaactggtggttatattgtcgggaaagaacagtatgttgaagcgtgtgcatatcgtttaacatctccgggaattggcgcggaagctggagcgtctttatacagtctgcaagaaatgtatcaagggttcttcttagcgccacatgttgcaggacaagcgctgaaaggtgcaatttttacagctgcgtttttagaaaagttaggaatgaacacgtcaccagcgtggaatgcaccaagaacagacttaattcaatctgttcaatttgacgataaagaccgtatgattgccttctgccaagcgattcaatatgcatctccaattaattcgcattttactccgtatgcaaactatatgccaggctatgaagatgatgtaattatggctgcgggaacatttattcaaggtgcaagtattgaattgtctgctgatggtccaattcgtccgccttatgttgcttacgtccaaggtgggttaacttattcacatgtgaagattgcgatttgttctgcaattgatgcattaattgaaaaagaattattaacaatttcttaaggggaagctgtcgatttcggcagcttttttcgtataaaagtaatgatttatgcgattagaaaaagaatgaaaaaattcataaaaaaaattataaaaaatcatgtaagaaaagctaacatctattgacactaaacataacatagtataaaatgagaagcagttaaggcgaaggaggaactgaaaaatgaaagaagatagacgttctgccccgctgtttcctattggtattgttatggatttaacacaattgtctgcacgtcaaattcgctactatgaagagcataatcttgtttctccaacccgtacaaaggggaatcgtagattattttcatttaacgatgtagataagttgttagaaattaaagatttgttagatcaaggcttgaatatggctggtattaaacaagtgttactaatgaaagaaaatcaaacagaagcagtgaaagtaaaagaagaaacgaaagaaatttcaaaaactgagcttcgcaaaatacttcgagatgaactacaacatacaggtagattcaatcgaacttcattgcgacaaggtgacatttcaagattttttcactaaagataactgattctgaaggcgattagagggactaaggaggaatttataatgtctagatacacaaaagaagatattttccgtttggcgaaagaagagaatgtaaagtatatccgtttacaatttacggaccttttaggggtaattaaaaacgtagagattccagtgagacaattaacgaaagctcttgataacaaaatgatgtttgatggatcttcgattgaaggtttcgtacgtattgaagaatctgatatgtatttatatcctgatttagacacttgggtaattttcccttggacagctgaaaaaggtaaagtagctcgactaatctgtgatatttacaatgcagatggcactccatttgatggagacccacgtaacaacttaaaacgtgtgttaaaagaaatggaagctttaggattttcagacttcaatcttggaccagagccagaattcttcctatttaaggttgatgaaaaaggaaatccaacattagaactaaacgataacggtggatacttcgaccttgcgccgatggatctaggggaaaactgtcgtcgtgatatcgttcttgaacttgaagaaatgggatttgaaattgaagcatctcaccatgaggttgctccagggcagcacgaaattgactttaaatatgcaaatgcaattcgctcatgtgatgacattcaaacattcaaacttgttgtaaaaacaattgctcgtaaacatggtttacacgcaacgtttatgccaaaaccactatacggtgtgaacggttcaggtatgcactgtaacttatcattatttaaaaatggtgagaacgtattctttgatgcaaacggtgacttacaattaagtgatgatgctcgtcacttcatcgcaggtattttaaaacatgcaccagcatttacagcgatagcaaacccaactgtaaactcatacaaacgtctagtgcctggatatgaagcgccttgttacgtagcatggtctgcacaaaaccgtagtccgttagtacgtatccctgcatctcgtggtattagtacacgcgtagaagtacgtagtgttgacccagctgcaaacccatatttagtaatggctacattattagctgcaggtcttgatggaattaaaaacaaattaactccaccagcagcagtagatcgtaacatctatgtaatgacaaaagaagagcgcgaagaagcaggtatcgttgacttaccagcaacattagcgcaagcattagttacattacaatctaatgaagtagtatgcggtgcactaggagaacacttacttgagcacttcatcgaagcgaaagagattgagtgggatatatttagaacacaagttcaccaatgggaacgcgatcaatatatgtctctatactaagaggcttgaacccttgatacaactcgtatcaagggttttttaattcccaattattacacttttatgtggttgcaaaatgaaaaaagccacataaaagccacgaattaataacaagtagtgatatcatagaaaaacattatcagataaacgtaagttttatataatttgtgaaatgaaaaagccttgatactacggtatcagggcttttttagtgaagttattggatatattaactactaggcaatggattatttttggttattttgaatcatgttactaagaaaatcttttcaaaagaattgattttatctttttttaaatcacttgtgctataacttaataattctttactgcttgtacaacgcgaccaatgatttttacgtcctcatctgcaaggctgtaagtttgtggcttgtgaatcgaatcattactcaatgatattaacgtaatgctgcttagttataacatagtcttattcaggatttcgttagttcattttctaaattttggaaataaatatagcttagtaccttgcaataaacaataccgagtggtatattatggataagataggtactgtgcattgaacagtactaagataggaaaggaggatggcacttgaacgttcagtttaaaaaaggtgtgcttgaactttgtgtattagcacttgtaaaacgtaaagatagttacggttatgaacttgttcagcaaatttctaataaatttttaatatcggaagggtcagtataccctttattacgtcgtttgacgaaagaagggtattttcaaacgtatttaaaggaatctacggaagggccacctcgtaaatattatcaattaacagagcaaggggagacgcaatttcatttgttagtaacagaatggtgtgattttgcgaaaggggtacaagaaattattgaaggggtggaatgggatgagtaaagaagggtttcttaaagaattatcaagttatcttagaaagttaccagaggaagagaggcaagatattttattggattatgaagagcactttcagtttggactagaagaggggaaaactgaatcagaaataatacaaggccttggttctccgaaagtaatagcgaaagaattacttgcgatgtatcgcttcgatgaaatgaaaaaaaatccatcgacttcaaatgtgacaagagctgttatggcagcgattggacttagtttgtttaattttattattgtgttaggaccgttagtcgcaattattgcttttatattttctttttggatcggtggtattgctagtgtagtaacaccatttttcgttattggaaaagtatttatgggtacttttatatggttggatcttttcgttagtataacgtttgttggagtaggtttattgttatgtattatcgctttttatagtacaaagtggtttaagagattgtgtgtacgatatgtaatatggaacttcaaaatgataaaaggagagtaaatgatgaaaaaactatttttaatcgctattgcttgtatcattattggagtaataggaatttcccaaacatatgaaaaagcagtacaaactgctaaaaaaggcgataaagaaaatgtaattaaaaacgaaacattaaaaaatatagaagttaagttagatgccggggatattattgtccaaaaatctcctgactcttctttttatatcaagcaatcaggagatgtacgtaaacaagagattcgtatcgcagaagatggtgacacattaaaagttattggggaaagagaaaaaggtgcttcatttgatttttctttttacgattttaggtttcaaacgtctaaattgactctccttgtgcccgaacgctcttaccaagatgtaaaagtaaattcatctgctggacaaatcgagatgagtgatgtgaaaagtgatagcgtaagtgttagaacacttgctggagaagtagagttgaaacaaataacggctaagaatgtggagggatcgacaaaagctggtgaggtgaattttaagaaggtattagggaaagtgaccgcaaaaacaacaagtggggaaataaatattcaagatcatgattctaagtataatctagaagcaagttcaactgcgggagatatagatattactttatcggaaaaaccacaagatgcggtaattactgggcaaagtgctgccggagatgtaacgatttttaatgaagaaaataaaaacgtaacaattggaaatggtagtaaaaagattagtggtaaaacggctgctggagatgtgacgattaaaactcgttaataagaaatagaatgcatggaaatctatcaaaatacaaaaaagaagataattaccgtatataaataaggtaattatcttctttttattattttttaatgtaaatcacgatatacgccaattactttcccgataactgacacttgttttaaaatgataggttctaatgaagaattttctggttgtaaacggaaatggtctttttctttatagaaacgtttaacagttgcttcattatcttctgttaaagcgactacaatttcaccattatatgcagactgttgttggcgaacaacaactaaatctccatcgaaaataccagcttcaatcatactatctccagaaatacgtaacatgaacacttggtctgctccagcaacaatactagctggaagtgggaaatgttcctctacgctttcgaccgctgtaattggtaaaccagcagtaacttttccgacaattggaacttgaataacagattgtgtttccgtatccattcggtcttcacctaaaatttcaatggcacgtggttttgttggatcgcgtcgaatgtatcctttttcttctaatcgtgataaatgtccgtgcactgtagaactagaagcgaggccgactgcttgaccaatttcacgtacggaaggtggatatcctttttcttgtacttttagcttaataaagtcgagaatgtcttgctggcgtttcgttaacttttccattttttctaacacctcgttttctttcatttttcttattaataagtataacatgtgaaaaaacattctacaaacataagttcgaacaaatggcggatttatgttacactatagggaaataatagggagaaagaggggttcaaaatgaatgcaattatttatgcacgtgtgagtacaacgaaagaagcacaagaaacatcattattacgtcaaaaagatgaattattgcatttagctgagcgctatcaaatgaatgttactaaggtgattgaagagcaggctagtggatatacaattgaacgtgacggtatattagaggtgttggatacaattcgagacgaacaaattgatgtgttacttatacaagatgaaacgcgtcttggtagaggaaatgcgaagatcgcgttaatgcattgtttacataaagaaggcataaaagtatatacgcatacacataacggtgaattacaattgtcggattctgattcgatggtattagatattattggtattgttgaagaatatcaaagaaagattcataatatgaaaattaaacgaggtatgcaacgtgcagtagaaaaaggttatcgtccagaaaaaaatttaaaaaatcgtcatttaagtgtaggaagagagaaaaaagaagtgccaattgaggaaattgtacgtttgcgaaaaagtgaactcacgtttgaagaaattgcagcaacattacgtggatttggtcataatgtttcaaaggcgactgtacatcgtagatatgtagagtatacgaagcaattgcttgataaagaagagtaactattgtatgataataatcagttttgattagaagggggattcgagatgattaatcacgaactcgttgaacgcattaacttcttagcgaaaaaagcaaaagctgaaggtttaactgaagaagagcaacgtgagcgtcaatcgctacgtgaacaatatttaaaaggatttcgtcaaaatatgttaaacgaacttaaaggtattaaagttgttaacgaagaaggtacagatgttacaccgacgaaattaaaagctttaaaaaagcaagataatgcaaaattaaattaaaagatgggcgaagcccatcttttttatttgtaaaaatcgttatttaataactttccagttgttattaactgttgcttctatcgttttatgttccaatatataattagcgataagttcagacatatctgtgggtatatcttttactactggtttgttttgaaacataaagaaatttcccccgccacttgcacgataattattcattacaacgtcatattcttcattcatattaagaggagcactgttatgctgtaaagattctactctttcaccaattggttttgaaatgtttaatacgtatgaaatcccttcccacatatcataattataatgttgtggctttggttctatgtaggtaggacttatggtgattgatccatctgtttttaatgtgaaataagaagcagagagttcaagagcattttttatatctgctccagttattttaattacttttaatgtgtttggataaatataattagaaacgatatcacgcattgttacatgttccgggaaacctggagatgtattatggaacaaacttgtacaagaaattgatacattagctatattcatctgtattttatttatgaattctataaaaggatgatcatgcaaacgagtttgcatagcatctgaaatttgcatgtccccttgaatgattccaataggttgatcaagccacttttgtgttttcttttcgtaatcggctaccaatgaaagtacatcttggtccgcctcaaatccttgtacagataataattcagaagaactctcttttttcacccatttatgtttcgttttttcgaatgttacttttacttttccaactgagtgtccattgcatccggtctgtaaaattgttacaccgttagccattgtgtgagaaatttcccggtgttggtggcctgttaataagatatctatgccttcaatttcatggcacattgcatatccttggttttctcctgttaacacttcagtcggtaccccggtttgtaaatctcgttcaactcccccgtgatacgctacgactagtaaatctggtttctcatgttcgcgaatataagaaacccattcttttgtagtctttaatgcatcttcaaatagtaaatctttaatgtgatgggactgttcccaatttggtatgtaatgtgttgttaccccatgcccatcaacttaaggatagaaactctacggttttccattaattgaaatacatgcctgcctgtcacgcaggagatcgccggttcgaccccggtcgggaccgccacttttgtttataccaccattagtggttttatatatagttttggctcggtagctcagtcggtagagcagaggactgaaaatcctcgtgtcggcggttcgattccgtcccgagccactctcaggatattaagtgggcccacttaatatcctttttatttatgtaattttacaaaactgagtagttattttaaaatagaacgaggagcctctagcagttgaagctagaggtttttctatagatcgtataggatgccgtgtaaaagtggatcatacatgagtctatgagaatagaggagaaaatacttaaacaaaggatgcggtcatataggacatactatgtaaacatcaatatgtttagggattattgaccatatttttataaggaggaaatagacgatgatgggaaagaaaattttagtagttgatgatgaaaagccgattgcagatattttgaagtttaacttagaaaaagaaggttttgaaatagtaatggcacatgatggtgatgaagcaattgaaaaggctaatgaagagcaaccagatatggttttattagatattatgctaccaggtaaagacggcttagaggtttgccgtgaaatacgtaaaagctcagaaatgccgattattatgcttacagcaaaggactctgagattgataaagtattagggcttgagcttggggcagatgattatgtaacgaagccatttagtacgagggaattacttgctcgtgtgaaggcgaatttacgccgccatcaacaaggtggtgctgcggaaaaagaagaaaatacagaaatggttattggaccaattgtgattaatccaaatgcatatagtgtaacgaagcgcgaggaaaatatcgagcttacacatcgtgaatttgagttgctacattatttagcgaaacatttaggacaagttatgacacgcgaacatttattacaaacagtttggggttatgactattttggagatgtgcgcacagtagacgttacagtacgtcgtttgcgtgaaaaaattgaagataatccaagccatcctactttaattgtaactagacgtggagtagggtattacttgcgtgacccagagcaggaatagtatatgaagaaagttggtttttttcaatctattcatttaaaatttgtgcttatatatatgctattaatattaatagcgatgcaagttattggagtatatttcgtaagggaattagagaagagcttagtacaaggttttagggattctttaacgcagcaaacaaacttattatcatataatttgaagcaagagtttaaaaaaagttatacaaaagcagaaacagagtcaacagatgaaacgattaaaacttcaattcgaaaatttgcctctgatcagaagaaagttatacaagaggtaagtgtatttgattcgcacagaaagttactggctatttcagatgaatcaaagcagaataaggtgaatcgaacatcaactgatatagctgttcagcgagtgttagtacaaaaaaagccagaagtgaaaattgagaaggatggtagtacaggtcatcgtgttcaagttatgcttactccgattctagatgataacggtaaggatgcgcttggtgttatttacattgtggcatctatggaagatgtatataaacaaatgaaggatataaatcaaatttttgctacgggaacagtaattgctttattagtaacggccgtacttgggattttattggctcaaacaattacaagaccaatttcagatatgcggagacaagcaatcgaaatggcaaaaggaaattattccagaaaagtaaaagtgcatagccatgatgaaattggacaactggcattatccttcaataatttatcgaaaaaattacaacaagctcgttcttctacagaaagtgaaaggcgtaaattatcatctgttttatcacatatgacagatggagtaattgctactgatcgaaaaggggatattattttactaaatgaccctgcggaaaagatgttaaatgtttctcgtgaaacagcgctcgatcaatctgttttagaggtattaggaatacaggaagaatttacgctcgatcatttatatgaagagccagattctgttttattagattttagtacgagaaacgaaccatatattttacgtgctagtttctctgttattcaaaaagaaacagggaaggcaaacggcttaattgctgtactatatgatgtaacagagcaggaacgtatagaacgggaacgccgtgagtttgtggcaaatgtctctcatgaattaaggacgccattaacgacgatgcgcagttatttagaggcacttacagatggagcatggcaggatccaaatattgcaccacaatttttaacggttacacaagaagaaacagaaagaatgattagacttgtaaatgcgttgttacagctatctaaactggatagtacagagcatcgtttaatgaaagaatgggtcgactttactgatttctttaataatattattgatcgctttgaaatgtctaaagagcaaaatgtaagtttcaaacgatctttctctaagaaatctagatttattgatatggatactgacaaaattactcaagtgctgtataacattatttctaacgcattaaagtattcaccagaaggtggaacagtaacatatcgtttacgtgatcgcggtgatttattagaaattagtgtaagtgaccaaggaatgggtattccaaaagaaaacgttgataaaatctttgaacgtttttatcgcgtagataaagctcgttcaagacaaatgggtggtacgggacttggattagcaattgcaaaagaaatgattgaggcacatggtggctctatttgggcgaagagtgaagaaggaaaagggacaactatttatttcacgttaccaatggcagcagatgaagaggacgattgggaatgagtatggaaaactttaaaacaatagttttaattaacctagttgtaattagcctatttcttacttttaatctatggacgtatgtgccagattctacatccatgcaaaacgcgaaatttgtacaggggaacgaaggaatgaaccaaactaaaatttccgatgttgtccgtcctacttctatcatcgtgcataaagataaaaatcattatgggagcagaagagaggcagatatagaatcaatctataagcctctagaattaggggaactacatgattttagagagatatcaatcactaagggtgatttcctttcatatgtgcatggtgaagggaaagttgaacttgttttccctaccgatatcccatttgatgcagttaaatccatgttcaacatgaaagagaaaagtacagataagcctaaacattttaatcgtattctccttgatccttctagaagtaaggatcaagaaattaaaattaactttgtttctgatggtgataactttaaaatatacgaggcaaaattaagtggcttgtatttaaaagatattgtaaatgcccaaaatcaatttatagtatcagcaaaaccttattttgattatcaacttaatgatatgaaaaaattatttttaccagatggaacgacagagttaagcaatataacatatatttcatctaatttagcagttgatacgtttaagaatgctctgtttagtgatcctcgttatttaagtccgattaccgagatgtcgaaagaaacatttacagatggtattagatccatggaaattgaaaacgatcgtcacatgctaaagtataaaaactcttctgtcttaactgagaaaacgatagataatttaatgcttttacaaaaaagctttgaatttgtaagtggtcacagtgggagtttggattcatatcgtttggactatatgaataaaggagagacagtatttcgcttaaatgaagatggatatccagtattcaatgcagatggattagcggaattaagacaagtatggggatcagaagaagtaatggaatatgaaagaccgttgctgtctttaaatactaaaggtatagaacagaaggttactcttccgtcagggcatgttgtaatagcatccctagaaaataatccagagataaagaaacaagtaattaaggatattggcattggatacaagttatcactagatgggcaagtggttcgactacaaccaatttggtatgtaaagcttgttgaagatgaaacaggtaaacagaaaatctatgagtggagtgagggaggactaaatggattgggatcggattaaaaccatatttattgtgaccttttttgttttggacctctttctcattttccaattcattcaaaagcaagatagtaatcaattggagcttattgcagaaacaaagatagatcaagaattaaaagcaaataaaattacgatgggaaatatccctaaagaaccgaaaaaagagtcatttattagagcggaaaataaagcctttaaagaagaagatatacagtctttgaaaaatcaaacggtgcatatacaaaatatgtacaagatagaaagtaagctaaaagagccttttttaaatacgaaatcattatcaaaagataagtataatgaatttttgaagaactatgtattggatggacaaaagtatgaatttggagcggtgaaagactctaaaatttatttcttccaaaaatataaagataagcctattttctataataatcaggcgatgattgttgtggaattaaatgaaaaaaatgaacttgtttcatatacgcagacaatgctaactgatttaaaagaaatgggcgaaggtgaaaaaacgaaagagcaagaaattattacggctcaaacagctttagaaaatttgtatttaaaaaataaaattcatggaaatacgcatgttaaagaagcgcaaattggttatgccactcttaccgcatctacttctaataaccaagtacttgctccaacgtggaatttaaaaacggagcagaagcaggacttctttgtgaatgcaattgaaggacaagttatggaattaggagaaaaggaaaatcgagtggttgatgaacatactggagtgagaaagaatggggttgcattttagcgtacttgcaagtggaagtacaggaaatatgctatacgtaggaaccgatgaaaaaaaattactagtcgacgcaggtttaagtggtaaagcaacagaggctttatttaaacaagcagaactgaatataaatgatgtatcaggtattcttgtaacgcatgagcatagtgatcatattaaaggattaggtgtattggcacgtaaatatgatttgcctgtttatgcgaatgagaaaacatggaatgcaatggaacatttaataggaaatatcccaactgaacaaaagtttcttttctcagttggtgatgtgaaaacatttggtgatattgaagtcgagtcatttggagtttctcatgatgcggcagaaccgatgttttatgctttccataacaataataggaaattagcgcttattacagatacgggatacgtaagtgaccgtatgaagggcgttattaagggagctaatgctttcgtatttgaaagtaatcatgatgtagaaatgcttcgtatgggacgttatccatggagcattaaacgacgtattttaagtgacgttgggcatgtttgtaatgaagatgctgcattagcgatggcagatgtaattacagatgagacaaagcatatttatttagcccatttaagcttagataataacatgaaagaactagcgcgtatgtcagtatcacaagtactagaggaaaaaggatttggagtgggtgaatcctttgaaattcacgatacagatccaaaaatgcctacaaaaattcaatacgtataattcttcattttagtaaacaataaaggtgaatatagttgttttcaggaagataggtgaacaaatatgtcctttattgatgaagaaagttatcgtatgaaacgtgcaggaaaaaagaagcacaaaggtatagttttttctagtatagcgggaacaattgtaggagcttctttatttgcgtttggagcgcctttattttcaaattctgctgatacgcttccgcaagctgaagcaagcggaagtaatatggctgaagctcaagggattaaacagattagctttgtagatgctgttgatcgtgcatctgaagctgttgtgggtgttattaacattcaacgagataacttttcagaggcagattcagaggccggtacaggatcaggagtaatttataaaaagacagatggtcaagcttatattgtaacgaataatcatgttgtagctggagcgaatcgtattgaagtaagtctaagtgatggtaagaaggttcctggaaaagtattaggaaccgatgtagtcacagatttagctgtattagaaatagatgcaaagcatgtgaaaaaaataattgaaattggcgattctaatactgttcgcagaggagagccagtcattgcgattggaaacccacttggactgcaattttctggaacagttacacaaggtattatttcagctactgaacgtattgtccctgtagatttagatcaagatggacattatgattggcaagtagaagtgttacaaacagatgcagcgattaatccggggaatagtggcggtgcgcttgtaaatgcagcaggacaattaattggtattaattcaatgaaaattgctgcaaaagaagtagaaggaatcggccttgctattccggtgactagagctgttccgattatgaatgaacttgagaagtatggaaaagtaagaagaccttatattgggattgaacttaggtcattaaatgaaattccaaactattattggtcaaaaacattacatttaccaggtactgtaacagagggagtttgtattttggatgtgaaaagtccttcgccaggtgcggatgctggtttaagagaacatgatgttattgtggcggtagatggaaaaccgattcgcgatattattggattccgtacggccttatatgataaggaaattaatgataaaatgactcttacgttttatcgtggtacaaaaagagtaacaacaacagtgaaattaggcattcaaaagtattaaaaacaggagggcctacctcctgttttctattgtagaaaagtgaggtgtagaaaatgaatttaccttgttgtttagaacatgttgaattagcgttagatattattgtggatgagtgtgaagtcgcaccagttatcaacaatgtggataacttagaaaaagagaaaaaaacatgtgaattttgtcaaaatgaggcgacatatgttgtatcgaacacagattcccacacaatatgtgggtagcgtttgtggatatgtggataagttttgtggataacatgtttgtaaggtggaggatacgtgtgaatatctcgattatttcaattgggaaattaaaagaaaaatatttgaaacaaggtatagcagaatacttaaaacgattatctgcatacgcaaaagtagaagtgattgaattgcctgatgaaaaggcgccagaaaatttaagtgaagcagaaatgttaattgtaaaggaaaaagaaggtatacgtatactggataaaatttctgatgacacgcatgtgattgcattagctatagaaggaaagcaaaagtcatcagaagaatttgcggtaagtctagatcgccttgctacatacggaaagagtaaagtcgcatttgtaattggtggatcacttggactaagctcagaagtgatgaagcgttcaaatgaatcactttctttttcaaagatgacattaccacaccaattaatgcgattagtgttgcttgagcaagtgtatagagcgtttcggattaatcgtggggaaccgtatcataagtaatgtattctatgtaaaacactgatattatcatatttattttattatgcctataattggaggctatgtgaatggtaagtgatcagatgagatattctagactcgcaaatataacaaaaataataaatacgaaattagaactacgtgacgtattgcagcgtgtgacaatggcgatatcagaggaaattgttaggtgcgatgctgttggaatttatttacctcaggaagatggaacatttagagggtttgcaggaaaaccagagactataaatggcgtaacgcttgatactcaagtaattgatcctgaaatagacttgctggcaaaagaggttattgaaacgaaaaaacccatctatattcctgatacctcaaaggatcatcgaccagatccgagaccggttaatgcattcaaaattaagtccttattagctctgcctatctcatttgggcaagagttatttggtctagtttttttgtttgattatggaattccgatgaacttaacagattcagaaattcaaagtgttgaagcttatgtaaatatggctgcggttgcaattcaaaacgcaaataatttaaaacaaaaggaaaatcttattgctgagaagcagctgttactaaatgttacacgtgatttatcaatgtgttcctcgatacaggagagttttgataaatgctttttttacctagaacagattttagagagtaaaaatatgactgcccatcttctagatccgctaaacaaaacaacaattaaaacaacgaaattaagtaagggctgtcattggacagaagcggattggacagagaaaagctatgaagccaagatccaagaggttattcaaacaaaaaatatagatagtaagggtctattgatgattccattggtttcaatgggagaagtattaggggtaatcgtcgttggcaaagaaggaaaagctcacaattatgatgattcccaacttcaactagcaaaatctatcgttgatgctacagcccctacgttttcgaatttgttatatatggatcaactagaaagcatagtggaagagcgaacgagagagctagctgctgctaatgaaaaagttacaagtgtgattgaatgtattacggatggattttttattttaaataataaatgggaatttacgtacgtaaataagcaccaatattttccgcaaagaaaaacagcaaaagatgtattaggaaagaatatatgggatgttttcccgagtgaaatcgacacagttatgtataaggaatttcatcgtgcgatgtcagagcgaactacagttcattttgaatttctttctactgcagatgaatattggcacgaagttattgcatacccgtatgatgatggtatttgttgtatttttaaaaatataacggaaaaaaagaaatatgaacaggaattgaaaagattatccaacatagatttaatagggcaaatggcagcaggtatcagccatgaaattagaaatccaatgacaacagtactaggatttttacagttattaaaagaagataatgcctatgagaaacataataagtactttcatttaatgattgaagaacttaaccgtgccaattctattattactgaatttctctcaatgggtaatacaaggaaatcggatttgcagatgttagatttaaattcaattatccacgatattattcctttaataaagattgatacgtacaatcaaaataaatatattcaagtcgatacaaatgacattccagaattacttttaaatcgtaatgaaatacggcaattattaatgaatctatatcgtaatggcttagaagcgatgaatacagggaaagttctaaccattagcacttacaaggaaggtcaaaattgtgtggtgcttgcagtgcgggatcaaggaaaaggtatcaggcctgaagtattagagaaactgggtacgccgttttacacgaccaaagataatggaactggattggggttaggtgtatgttatgccattgctgcccgccataatgcaaaaatagaaattcaaacaggatcggaaggcactaccttttttgttaaatttaattatgaaaataataaaaaataaccttatttagaatagttacgatgaaccgtatcataaataaatttattctttgcatataaaaggataaaaagaccattggacaaaaattaccgatggtcttttaaatattattagatggtatgtagatttcctaaaataagtatgtttctatttccataaaaatatgctgtaatatgaagaggaaaaagtataagtagttagagaagtgaggaattaaaggtgaagaagtttaagaagttttacttggagattacgagtgtatgtaatcttgcgtgtagcttttgtccgccgacggaaaggcagaagcaattcatttctgtggaggattttgctaaaagattagaccaaattaaacctcacacagactacatttatttgcacgtgaagggtgagccgttgctccacccgaaaatagatcaactattagacttaagtcatgaaaaagggtttaaagttaatattacaacgaacggaacgttaattaataagagaagacataggctgttaaataagcctgcgttaagacaaatgaatttttcactgcatagttttgatggacatccaggttcgcaagataaagagggctatgtaaggagtatactttccttcattagggaagcgacaagtcaatcagatttaattgtatcgttaaggttatggaatttaactcaggataataaaacgaatgctgaaatccagaaaaatagagagttattatctataattgaaaatgaatttgatctatcttatcaaattgaagagaagcttacaccaggaaaaggtataaaaattgcagaacgtgtctttattaatcaagactatgaattccagtggccagcattacatgaagaagaggatgatgggaaaggattctgtcatggacttcgtaatcaagcgggtattttagcgaatggaacagttattccttgttgtttagatggtgaagggattattaaccttgggaatattaataatgattcattttctaacattatcgaaggtgaaagagcaacaaacattgtcgatggattttcgaaaagagttgcggttgaagaactttgcaggaaatgtggatatcgcaaacggtttgggaagtaaatatgaaataagccctcataaagcgagggcttattttttatacttgataagaatgctctaatttatcaattaatgaaccaacgtaagaaacagctttacggattgcgtctggttttgacatatctactccggcatgtttcattgtaccaccagcgatcaatagcgggttgtccttcctctttaatcatttgagctactgcagtggatgcagtgtgtgctgccttttttgtagtatttctagtaacgatttacggaaaggttcaagttttgtttcttcagttaaatatttttcaattgttccttcgccgaatatgaggatttcattatgaataaaggatagtgcagtatgtactttcgtccataaagcagaaattttggaagagttcgcttgaatacttggatttgtacgatcagtagattcttttaaatttgcatatgagtacagttttgttaacgtcattaaaagttcttcttctaaaagtaggcaatttaataaagtgtgggagctagtatgtaaatgtcctttaaatgaatcaagtttctgtatatcattttccaatgcgtttaatgcagtatgctattcggcatcagaattatacaaatcggataaatcccatgttagttcagcaggtacctctgcgcaattaagacgattttctattacatttttcaagtcgtatatcctccttattaagactatctaaaaatataatgatagaaaattcggttaaattaaaatatttttcatttttatatacaaaaaagaaggacaagcatgaaaatgcttgtccttcaagttaatttaagaattaatatactttgtcaccattgaaaatcgagtttttcacgacaacataatctacagtacgaatagcatctaattttgttccaccagcgtaagagatagaagattgaagatcttgttccatttcgattaacgtatcttctaaagaacctttatgctcaacgaacattttcttaccttcaacgtttttcttctcacccttttggaattcagaagcagaaccgaagtattctttataaagtttgccatctctttcaattgtttcccctggagactcttcgtgaccagcgaatagagaaccgatcatgaccatagttgccccaaatcgtatagatttagctacgtcgccgtgtgtacgaataccaccatcagcgataattggcttacttgcagcttttgcacaccagcgaagtgcagctagctgccaaccaccagttccgaagcctgttttaattttagtaatacaaactttaccaggtccaataccaacttttgttgcatcggcaccagcattttctaattctcttaccgcttctggagttccaacgtttccagcgataacgaagctctctggtaaatgttttttaatatgttgaatcatgttgatcacagcattagaatgaccgtgtgcgatatcaatcgtgatatattcaggtgtcagttgctcagcagctaattgttgtacgaattcatattcgtcctcttttacaccaacgctgatagaagcgattaatccacgtgattgcatatctctaatgaatgagattcgtttctctggttggaaacgatgcatgatataaaagtagttgttctcagctaaataagttgcaattctttcatcaataatcgtttgcatatttgcaggtacgacaggtaatttaaatttatgttttcctaaagtgacagttgtatcacattcagagcggctatttacaatacattttgcaggaattaattgaatatcttcatagtcgaatacgttttccatcatttacacccctaaaatacgaatattttatttttattaattaaaaatgttcgtccataggataatttacattatttttattaagaagtcaaagaatttcttaacattttttgaaaaagtagattttatacctgaaaaacaacgttaaaaacgaatttaaaacgtttttttatttttattgttcgtttatgaaaaaggttgaaaaattaagataattacacaaggttgtatgtattctttttatttttttggagtggatgtaggatactatgaaaaggttaatgctaacaatgcaagcaaaagatgttatcaagtagttgaacaatatatgaaatgaaaaggtttgtttctatataaaaagatgaatctggcatgattcaccttttatgtaaggtttcaagtataataagtagggtgatagtaacgtatacaaaagataaaaaagaaaataatacagaataaaatgaggttaatatatgagtaaaaaaagtttttctgattataaattaagtaaggaaattgtaagggcacttactgggttagggtatgatcatccaacagaagtacaaggtgaggttattccagttgcattacaaaagaaggatcttgttgtgaagtcccagactggaagtggaaaaacagcttcatttggtattccactttgtgaaatggtggagtgggaagagaataaaccacaagcattagttttaacaccaacgagagagcttgcggtacaggtaaaagaagatattacaaatataggtcgattcaaaaggattaaggctgcggcacatgcccatcaacttaagaatttgcactacccccaagtgtcaaaaaacgttattcactttcacaagcttcatttttcccattggatctggcaatttcttatttcctatttcaatttctacttctgcatctttttctatttttacagttattttatcttttaataattcgtaacctttaggtgcttctacttccactaaggtatagtttcctattggtaagtcttttgatattacttctccttcttcatttgttactagttctccaactattttcccatttaaatcttcaattttaaactttgctcctgctagctttttatttttatcacttatgtctactttcacaagcttcatttttcccattggatctggcaatttcttatttcctattttaatttctacttctgcatctttctctacttttacagctattttatcttttgataattcgtaacctttaggtgcttctttttccactaaagtatagtttcctattggtaagtcttttgatatcgcttctccttcttcatttgttactagttctccaactattttcccatttaaatcttcaattttaaactttgctcccaccaattttttattatcattattactatcaaccttttttatttttacttttcctgtactaggcttgttccaatgtttccagttaaatttgaaattgtgaaactcaaatccaccagtttgttgtaccgcaccaacaaatgcttgtccattaatcgaaccgccttttgtttctaatacagcattgggagcaaacacactcccaactacaccatatccctctgttgtaatttttttcgcatttggaaaaacccaaatcattttcccatatagctcagtaaacggggaattaggcgaatatggttgtgatgtaggaactatatctgtagcctttccaatattgttcgtgtcatatagaatagacccatttttaaatgtaacctctattgcatctgaatacattacaataaaatctttgtccttagcattgggcaaaaatacatctcttatatctacactgattttccctgtcaattctgatgaaacataaatattaggattgtttatatcttttccgattccatgactcatatttggaattggggtattcgttttatattgacctgcatttttactaacttggttcactatattgcgaaattcattaaatttcgcgtcaatttctagtttttctttataaacgatacgatcataagaagattgtatgatgcgatctggatcactctcttttgtcattacgactattccgttttgaatgataaaagattcttctcttgatttttttagttttccagacaataacaaggacggatatccctcatcaacccatttttcacctactatattagatgttcctgctgctgcacctacaatcgtataccccgatgcatccatatcaccttgaactgcaattgctccttcaatgtcgccacctattgctttatggttaccaaagacaacagcattataacgcgatatatctcctagaccttctaaggtagtcgtggaaccatatgcttcttttggtacatatacgacaaaacttacacttaacattaacaaaacaataaaatgaatacttaccagctttaatcgtagcctcaattcctttgttcccacctttaccgtatttttttataatcgaataaaatgaatttttattaatgatgatttacttcatcccctatataccgtctttacttatctttgaatttccggtcccacttcccattaatgcaggataaatacattctatcgagttaactttttcttataaattacgactagaagcacacataacaataggattgtaactattacagtccacttattaaatataaatatctctgtactcactttttgtttttctttcttgtttaactccacgcgctcacctcgaactagcaatctattggtgtttactccataaggcgtacacgtaattaaagttgtataatctttattttctacaatttgtagatcgtccgtttcatgtggtaacactactttaatttgatctactttataagcaagaactttgtctaaagaatgaatataaaaaagatctcctttgctcaacttatctaaatctgtaaataattttgctgatggtaaaccacgatgccctgttaaaatagtatgcgtactttctccacctaccgggagcgaagaaaaatctaaatgacctatcccgcgacccaatacttcctcagaggtcccttgatagattggcagttttatattaattttcgatatttcaatataccccattacatctcctaaatttaacacatcagcatacgcttgatgattactttttttttcagaaaatggatctgtaaatgttttcgcagaagtttgaacttgtttattatattcggctgcttctttttccctacgttcgacttctttcttttgtaatgctttaatcttcttatcgtaagagctaatctcagaataatgtgcacgagtcgccaaccaattactaatagtaggatataaaaaaatacctaatccaaataaaaaaataccccccaaaacaagatttcgtttcatatttccacctctgtatatgcttaaatatcgaaaagagggaagcattttgcttctccccttttcccatagttacatgttcctaaaatcttaatttctagcaaacttttttctaaagaaaacaaatgccgctgtaagcattaacgtaaggcctattacagtaaaaagagtcgttcctatgccacccgttaccggaagaatccatccacttttattattttcaatcgtcaatttaaccgtttgattattttcactaatctttacatcaatggggtcttttaataattgataagatgcttttgtaccatcttcttttgtatatgttggtgctttcgtttcaaaaatttgatagtctccatatggaatgttagaccatttaataacaccattttcatctgatacacctgttacttcttttcctgctacgacaactatttttccattattatctttaagtacaaactctgcaccttttaatttattcttattagcactatcaatttttgttaactcaattattccagttgtcggaataacaactacaggtttagattccttttctccaattacatcatttttatttgtaaaatgtatttttgctgtatttaaaatttccgaaccagatggtactccttcttttacttgggatttaatttgcaaatgaaattcttttttaccatctaattttgtgaaatcttttactgtagctgttactttttgaccttctatagctacctcaacaacgtttgcatttacttctgctccatcaattttcacgattggctttccttgaatcactaaacgattatccaaagtatctgttaccacatattttttgtattccttaatgtcttctggaattaatgttttaatatcataattataattagttaacggatttatcggtaacgcttccaattttccgttaatttttttatcaattgttggttcttcattgtttttcacttctattttaactactgtaccagaagtaatagttccatcttcattaattgttccggagttcttaacaaaaaactcacgtttagttggatctattacgtagcctttcggagcttttgtttcttggaaatagtattcaccatactccaatccttgcacgcgaatatgaccattagcatctgttactaactcttttttcacttctgtaccatcttttttaaataaagagaatactgcacctgctaatgctttttcatttacaccagtttttattaaatccactgcaccacgtttaatctcatttttgggatacatgtgaacatcatagtttagcaccttaccctctttattcgttaatgggatatccactgtatacgtattgggatttagattaacatgtggaggtcctgccacttctttcacctcataacgtcctagcggaagatcttttaatacagcttgtccgttatcatctgttactacttgatttggagtggctcccattacaggtttcacgtcttcttttacgattttcccatcgtttgaaattttttcaaaagaagcaacccttttcacttcaaacgttacaccttttaatggtttcacatcttttggcacctcttgatttgcagaaccgtcaccttctagtccctgcgctccatctttttcttgttcatacttatgaatcgttaaagtacctttagatggtgaatctgcctttactaatacactagaccatgtagaaaatgttaagaataacactaaaagcacactaaatatttttttcatttctcttatcccctttactacttctatcattttaaaaatttctttattactattaccttcttaaaagcaatagtgtgccaagtatcagatttaaacgaataacataaaacatagtcgtccaacaatccattgtttacaatcacttattcacttttcttatcttctattattacgttgtctctccacatgatatatgtaattttctcccctaaattacacgtatatccctatttcaagaatcattacatttgttacataatagctttcactgctaatttcgactagtcacttactgtcaatctattcatatctcacttcctatccctatttaaaatccaatcttaatcattttttaatacatataagtaataaccaacaaataagtgtgacgattcatattttacgttactgtccaaaactattacctgtatattcaaataatatgtgctattcatgttaaattatggtattattcttagaagtttataacttttatttatattttttattgataaaggttttccgtatctacttatgaaaaaggaatatatgtttatttaactattacgcataactgtaaggaggaagaatatgactaaaaaactcagtctagttgagatagagtacatttgcaatatgttttttcaatctttcgaaattccagtttgttttttagattgtaacaaaaatattcttttagaatttaaatccaaaaatgattcacattcgttatatacatcaaaaatagaacagttacatatgctttttcagagaaatgatacatataattcccccatcttcagaactcacgaatatctagggcactttattttaattcacataaagagcgattatatggtgaacggtactgttattattgggcccttgacacatgtaaatttttctacaagtaaagcggatagtaaccttaattttattccaaattataaaagaacaagagaccattatttttcattgtcagtcaaagatcaaaatttctttgtaaatatagcgatattgttctataacattctctataaaaaaaattcagatgtaagcaccttttcaaataacagtgactcacttcatataagtcatagcagcatcttaaacgaagatgtatatatttcaatgcaaaaagacgaatccatttatcataatttatatatagagcagcaactacttagttctatagaagacggggataaagaaaccgtactcaaatattattacgaattccaacaagagactctttcatctttatcttcattccatcaattaagacgtcataaaaacatttgtatttcatccatcacgctcgctactagatatgcgataaaagggggacttccatctgggattgcttacaaaatttatgatttacatattcaaagaacagaagatttaaaagacaaagaatctgtttgggatttattaaaaaatgctttttgtacctttgcagaccgtgtaaaggcacaaaaaacacagcaacattcacagactattgctatttgtaaaaactacatttttaaaaatatttacaatccaatatctgttaaacaacttgctaaatttgcaaatgtgaattcagattatttatctatattatttaaaaaagaagtcggtatttcattaattgagtacattcaacgtgaacgagtcgaagaagcaaagaaattattaactttcaccacctatcccttatcagatatatgcgcttcgcttaattttagcgatcaaagttatttcactaaaatttttaaaaaattcaccaatgaaacacctggtaaataccggaaatctcatgttgtcatttagagtgacacttccattaaaacaaagtgttttcagtaacttatcaatggcaaattagaagtactcctatattcatgagctataggatttatactattttcaaattaaaaaacacgttactattcttttattttaatgagaatagtaacgtgttttttatgtaatatagttctgtagacagaatagtatccaactgcaaatttttataaaagccaaatgtaccgcttaactattaaaatcttaataagtaaaaaatccatatttcgttttatttactttctactttatttcttttgaatactgaactcttttcttcaaacgaatgatccctactattatttttgtatctttctaaatttgcgaatcaaagtgagtactgtacctgcaataatcatcaatatgccgattgctgcactgttagttgtacttacacccgtctttggcagctccttatatgtatattcttttttatcggtattactgttatttgagatattattgttatttgtcttattagcaagaccattaggtttgctagtttctttatctttcactaatactttttgtatcgtatttacctcattacccacggaatctcttacactatatattatttcataaataccggctttatttgtatctatagttccttcatacgctactttagaagtaaggtcaccgtcttctttgtcagtagctgatactcctatcaacggatcaaattgatcaccctcagtaattgaagttgtagcaggtacttttagtattggtttatcatttttaacttcttctctaactttgaccgttacagtttgcttcgccgttacttcatggccttttgaatctgtaactgtgtattttaatacgtaagtaccggctttatttgtatctacttcaccatcaactttgattttagaagtaagatcaccgtcttctttatcgatagctaatacttctgccattggaacaaatgaatctcctacatgaattgtcgctccaacaggcactgttaatttaggttctaaatctgatgtttcgccatttccctctacaattacagtctgtgtagccgttgcattccccccttgagaatcaacaaccaagtattccacaatgtatgtacctggttttgaagtatctacatcgcctttatgctttactttatttgttaaatcaccatcttctttatcaacagcttttacatttctcattggatcaaacgtatcacctacacgtagtgtaatcgtaaacggtacagttaactctggagcttggttttctgctgttttttcgttttctttcaccgttcctgtaatttttgccgcatcaaaagcattttggactgcttgaacttcaattgagttcgttccatatttattagctgcgactttaaggcatgccaatttcaattcagagaaatcagaagtcatgtttaattcatcagtatttgcataatagaaaatatcaaacattttatcttcaccaataccatttacatttacaccgttatgagtaccaccttgtgcaattaaatacgcaactttattaataatacttgaattaaaatgtacgcctccataatcctctccatttaaatcattatatttactataatcatcgggatacggtagtccttctgaaaaattaattgcagttggatttttcatattacgaaaagtcgatccagtttgctctcctattgtccagttaaattccccattatttatgtatttctctatagccgttcccataatatccgataatgcctcgttaattgccccagattctcctgagaattcaaggttagattcacttgatgtaactgcgtgtgtaaattcatgaccggctatatcgaacgcttttaccataggatctccatataaaagcatactgatgttattaatattagtactaaatgcattctcccaattttcaggatcatttgttcctccagaatcccatgcatgtacaactgaaactactttttttcctttattatcaaaactattacgattatatttttctttataaaaatcatatacctttgttgctaagaaatgagcgcttaccgcctttggatcattaaatgttgttgaagcgctagttgctagtatgccaggataataactttcttcatttgtaatatctctataatttacatcatatgtctcaattccttgccctcttgtgtaatcagcaagcgcataattcccactggtctgtttagaaataccaaatgtacgagttacgcctaaatcatcttttcctgttccagttaatgatgtgaaattgctagttttattttccttaacggattcaacatactcttcacttattttcaaacttgattcttgtaccatatcttttaacatatcgccattatgagcattcactaaataagttccagatacataatttggtgttgtagcagcaaatgtaacttgatatgcattgctagcctgcccatgattttcatcaacaaaaataaccgccttaacttctggttcagaaataaatttaatgtcgtttccgtactttttataaatatattgtttcgcttcttcttttgataaattaataggtttctttaaatcttcttgtgttaaattttgtgcgctagctcctgaaatgcttttaataataccttttttatctacgtgagcagttaactggtggccatacacttcttttccttcatatatttgttgcatgcgcacaagtgtagttccatcataagaaccacgtttttgaagaaccttgtaatctactcctgtttctgcactaacttgttttggagacaaagcatgctccgtattttccttaagtgcatctttcactacattctctggcgccttttttgatggttgtgtaagatcacctgtacggaacgaatcctcttgaatttcaacttgcatttgaccaggttcctctgcatgacctactctatatggtgttacacttgttaaaacaaatcctgttgttaatgcaactatagctatttcttttttatttctcatggtatttacctcgtataaatttctattatttatatgaaactgctaaaatgtatacaatctattcctaacataaaaagatgacttttgtaatctacaaaagccacctcttcaatatataatatccctaaaatgtttttaatacataatttctatacaaaaaagaaaaaagcattcattaacgagcattttgcaatacttttattaggtcatttatattttcaactttctgctgaaactgatcaaatctgttatgaagcgatgaaggatttttatcttcagttgaaataacttgttttaattcattttctaatttatcatacatatcaaaaaaattatcaaattctacacttacaagctcttcattttcgcgatagaatctttttgcttctaaataagtcatatatgatttatttaaaaatcctaatgaaattaaatatttagaagtgttttcttgataaatagcaatatcacatgctattttaatatcagaataagtcttttgaacgagacaatgcaattcaaaaatcttaaactttaatccattattcatttcatcccctcccatcgtatctattctacataaaattagaatattatacaaagaaaattattagcaagaaattgacaattaaaaaaataacttaaggataaacaaaatccctctcattataaattataattgcggagcatttaccaacataacagcaaaataaaaaacgaaaagaataaatctttccgctcttagagtaataaatacatttcatattgcgctaaagaattcttttcaaatccacatttcttaaaaaaaccctctaataaattattgttaggaaacccaattgataaacttgataaatttaattcttctcttgctacttgtaataatttcatcccaacaccaatatttctataacctttgtctacgaaaataaaactaattttaccttgttcagttacgcatagagagccttttaagtcattatcaacatatgcaccataaaatacattatttgtttttttgatataatcaatatcattttgccaatttatatggaagtttaaccatttctgaatttcatctttaaaagttggaaattctaattgttttacttcaatatccttacaaactttattctttattttagtcaaatcatttaaattataataagaaagatcgtacactttttcatagcccaacttattataaaaatgaatcgctcggtcgtttcctacaatgacttcgagaaaaagttgcttacatccatgttgaatcgcctcttctttatgcagttcaaataatttttgactcacaccaataccgcggtaattaggatgaaccgctaatgttccgcagcgcatagtctttatactttcataatcctttatgccacctagtattacgccaacagatttgccttcttctaaagcaagaaaagaatgttctagcaaattaccttctggtcccaaaaaacggtgtataaaatccccttttgaaacttccatcttaataatataatcggaaaatccatctttaaaagcttcatatactaaatcaatatttacttcactacaccttttatattgaatcatataaaattgccctccaattgcttgtattaacctcaacgtgtacccatataatatattccatctattataaatttcagctcttaatttgaaatgaacggacatttccctacatataactcacttttaatttgttttataacaaactatctattatttactacattaatctcataaacacgcaaaaaagcaattaaatgctcacatgctctttcgcatgctagcattttaaagattttttgttcttctttcgttttatcattagcctgatctgaagcagcttttaaacagagaaatggttttttatttatttgacacacataggcgaaagctgctacttcttgatcaactgccaatgctccatatacggtatggagtaaatatctcatttccgaactacgaatacgttgatctcctgataaaaatgtgccgaaatgtatcggatcatacgatcgtattttttttattcttcttacaagtgattttgttgtttcaataggtgctgttctaccgttatataaattaaaaacatcttcccctgaaccagcagcagtaacatcgtgttgtattgcgcttagtgccactacaatatgaccgttttgcaccttgtttgataaacttccgcatattcctgtcataaacaactcatctggctgaaactcactaattaacaattgtacacaactagcgcagcttactttaccgacaccagtaacaactgatataatttccagctcattaatagtatgaaaatgaaattcccaagctgctcttttttcaacacgttcacttggataatgttgatgcaaatacgtcagttctggttcccatgcagatacaattgcaatacgtttcattacacgcttcacttcccctattgtcatttaaatgagttatctatactttctcattcataatctggaatccattctttgtatttcttatataaatctcgtattatttctttattcttcgcaattacttcacatcctctatcatcatacataaacatgacaatatctttcgttgcatttatgagaaatacatttggataagaaatttctttttttcgtccaaatcgaggatataaatcaaagaaatcctcatgattagcaacttgtataagcgattcatatttaatatgttccgcaaggcattttaaagaaaaatgatatgtacaatataaatctgcttcttcatcttcaaataaaaacggtaacgtttcttatcttatatgaaatcttaaatctcttttcttaatatatttattgtatacatttattttctgtggagtttttatattttcctttttaaatctataaacatttgtcactaagaatataagtagggtactaatgtaactcctggaaatgtttgattcatatattcttttaattgcatttccttgtcctttctactgtacaattccttttaaatcccagtatgcttcttctagccacggatgtataactttaaatgtatctttcctttcccacaaatatgaaatatatacaaaagctgctttttccaaaaattttgccaatcctttttttatttctattaaatatggtggtgtcccgttttgatcccattctattttatctgcaacaaataatactaaatccatcttcgttgcatgtttacgcaacgttgtatggcaacaaattgcatttaaaatttcttcatcttctactttaaatatttcttttgcgattactctcgatagtttttgatgaataatcataggaaactttctttctgcttccactatttctatcccaaattcttcagcaactgcaatccgctcctcgttcggaaaaatgccactaatatcatgtaaatatcctgcaagtgctgctttttctttatctacgtgaaacttttctgcaatcttttttgcctcatttgctacacgaattgaatgtttatatgtaaactctttattatattttagtagaaaagctttaatatcattttctatttttccagtttgagtaaatgaatatatatcattacataacatagaaaatccccttataactacctttcattataatgtagaatctaaatatccttgttattttatattcgttattaatctttttactcctttttaatacgttacatgaaattttatacagaatcatcgctacaagtacataaatgtttgatattatagtaatgttgatgatttgtaaggaaaggaactacacaatgaataaaaacatattaattattgatgatgataaagaaattgttgaattacttgctgtttatttgcgaaatgaaggctataacatttataaagcttatgatggcgatgaagcattgcaaaaggtttctacatatgaagttgaccttatgattttggatattatgatgccaaagcgaaacggattagaagtttgtcaggaagtgcgtgaaaataatactgtaccaattctaatgcttagtgcaaaagcagaagatatggataaaatattaggtcttatgacaggtgccgatgattatatgatcaagccattcaatccattagaattagtagcaagagtgaaagctttattacgaagatcatctttccaaaacgctacttcgcaaaagaatgaagatggtattattcgtattcgctctgttgaaatacacaaacataatcatactgttaaagtaaatggagagtatattaaactaacctctattgaattcgatattttatatttgcttgcaagtaatacaggaagagtatttagttcagaagaaatttttgaacgcgtttggaatgaagatggttacggttcaaataagactgtaatggtccatattagcaacttacgggataaacttgaaacagtaataaatggagaaaaatttattcacactgtttggggagttggctcatgcccatcaacttaagaatttgcactacccccaagtgtcaaaaaacgttattcgctgttttttgaatgtttggcttcgctgtatctaaccagtaatttgcattgattcgtgacagttcctgattcaggtggatatttttgattaattctcctcctcctgaacctaaatcaatgttggataaatttacattcggttgcttaatcatagtttttgcgtacaaatccattacaagaatatgagagcctgtttcagccaacgctttctttaatccttcaggtcctaacgcataattttctattttctgttcttgagctgtctgttcttgtgcaagtgcatgaatagtactaccatttgtagcggttataatcgttgctaaagtagctaaggttataactttaaatggaaatttcatcatttgattctcctccttattttccgtttcgttataattttttaataaacctaatttcttaatatcaaaatttataaacttgttcttcaagttgaattgttacactttttaatcgtcttaatatatctttttgagcctgagtattattggtatcaacttcagtcgataattttgtaatactattatttattagatccaaatcctctttgtaacgtttcattagctcaatttctccatctacttggttagcaaatgtatgcaaatcattttgcatgaaaagaatcattgatttttgtaaatctgctactgttaatttagttgttaagtcatataatttctgattttgtttctctaaatcatttaaatatgctctttgctcagctgttagtttattaatttcagcaaaagtattatatgttttttttattttttcaggatcaatcactttcataagatcatactctttcgtttttgtaactgcagctgcagcgatttcaccttttttacttttctctatcgcttcacgtgcttcttttttggcagcctcaatttctatagctgattttcctttttcttttgcttcttgctctgctttattctctgcgtctacaatagcattgtttatttcttttcctttgttatacgctactactgctgtttgagcagccggttcaatgatatcttttgatagactataaatttcttggaatacctttagtccttgttcatttaaagctcctggtaataacgctatttgctgtaaatcattttgaattgatttttttgtatctagcatttcattttttaacttatctatttttcctgttccctctgaattaaggacactttgtgcttttaccacatcagtatcaaggtttttcaacttcttatctaccagtaattttaaatctgttaactcattaatttgacgttgcacactttcttgatttgttatagtcatgtcttgaagaacttccagtctatctgtaaacccttctttatcttccttattatctacaaatccttttaatgttggataataactattaaatttagttacaaatcctttactttttgaatttaatagaattaatttaggataaagttcggatgaccactctttcatatcttgtttaattagaaattgagttgtatttaaagatggaatttcttcaaattgtacgttcggacttgctaaagctccatcgataaaggtttgtgttaacttggagtgtgcacctatttttcgtaatgctgaggaaatatctacattatcttgttttgtttctgcctgaacgattggcgttgctagagtattgataggaaaagtcgccccggtaacaattgatgttattaaaaatcctgtcataattttattcttcattccttacacctcttcactattgttttttacaagttttagtcgtaaatgttgtacaacctaacgttaggatttcttcacacacacttgcggatagaagtttttttgaaagagtaattgcatctcgttttttatttatttttgatagaatataaggtccttacttcccccccattttaatcactatgcttttcataagtaaactagaaaatcgcatatcttatgtttgatttttccgacattaaatattttgtttttttctaattatattaaaaaaatttccatactattatcacttcatgaagtgaaataattttactactataattaaacataaaatttgttggtatcattaattcttaataaatatcatgcaaaaaaatgttttcactataactttatgggattttatgtattatgtactttatatgaatatgtacaattgcatactcatatactctccttcaataacatacaaggtagtcactatacattcctatcaatttaagtttttttactcctccaagtgtaaaaaagtttttatttctaaaatttaactagaaaagatgatgttttttatagtttgttcgaactggagaatacaaccaaattaatctagataatatagtgaagaagctttttctcagaaagaaggaactgattctaaaaatgaaataactttattgctacttaacatttccttaatcggccttttagttcagatcttcttttcactataaaaacatcccttttgataaaaaggttccaaggaacaaaacatcgcaatttttttaaaacattacacctcttttgtaagcaatgtgactttatttaaaaagcgacattaaaaatttttttcaaaacctagaagtaacagtttgtccaaaacaaaaacaaccataagtttgccggtccggaaaacttatgattcatatcacacttattcttaaaattattcattcaaatcttctacttatattattttttcaagctctattacttttaaacaaattagaattccattttcatgtagaaacatataattttctttctgcttttttgtagaattgaaagtctaataatccttgaatctacggatattttttctaatatttatgattttctacgctctaacattaaatcttcccttttgagggtaagtctatttcctatttttgataacctataaaagttttatctttatttctttttaatatatacgatatatatttataatagattttatcgattctggaacgtgattgattttgtcctaatcaagttaaacttttttactgaaacaagatataaatcgtcagttttaactatatagttgagaaggaatggcataaaaaaggaggaaaataataatgaaatatcaaacaatattttcatcgttaaaaaaatcctgttttatcttaatactctctttcattatattaattcttgcacttccagcaccaacttttgcacaatccaataacaatgttacatctggaacagattactatgtatctccggcaggaagtgacctcaacactggcacattagatcaacctttcgctaccattcaaaaagctgctgacgtcgccacagaaggaagcacaatctacataagaagcggagtttataaccaaaaagtacatgtaactcattcaggaatctcagaagcaccgattacttttcaaaattaccagaatgaaaaggtaattctagatggctctaaagtcaagttagaggatgatggattatttaccatagaagataaaaattatattcaggtaaacgggttagaatttcgcaatttaaaatcaacgaaagttagcgaaacccctattggtatttatattaccggaacagggagtaatatcgagattagaaataattatatccatcacattgaaacgaatgtaaagaatggaaacgcacacggtattgctgtctatggtacttcatctagtgcacaaaataatttaaatcatattgtcatcgataataacgaagtagcaaatttgaaattaggactaagtgaagcaattgctgtgaatgggaatgttgattcttttggagttaccaataacaaggtgcatgataacaacaacatcggaattgttctgattggacatgaaggagtatctccagtagctgctttagatcaagcacggaatggaattgttcgtaacaatatcgtccatcacaattcatctttcaataatactagttataacgaatattcagctgatggtatttacgtggatggtgggaaggaaattattattgagcaaaatcagagctatgaaaacgacctcggtattgaagtagctagcgaacatgcggggaaaagtgcaagtcaaattacagttagagataatacaatatctaacaatactatgggtggcattgcaattggtggatatgacagtcagcaaggatacgctgaaaataacacgattaccaacaatttgatttataaaaatgacacaaaagatcaagagagtggtcaaattgaattaaattacgatcttcgtaacaatgtgattaccaataacgaaatctatgcaagtaatagtcgtatttttattagcaataattttaataaaaacactggaaacaaactcgattacaatcattactatggtgaattcgatcaaactaatggcttatggcaatggaaaagaaaaatgtataaaggattttcttcttatcaagcaggtatgaaccaagaaggaaatgaacaacatagtgtatttagcaaattaccctcttcattcaaactaatacagtagtctaatactaaattagtattacgttataaaaaagtacatgcaataggcactttaagaatactaataaatttaaccttattaaaacaaaaagagatgccctagtaccatacctagggcatctctttcattttattataaataatcttaatttctagaccttatacatccctaacaaattaacaattatccactatattttctacttaaaacatagtattattattagctgcttcacttggaatctcttgaattacatcccagtgctcgacaatctttccatccttgttacgaaatataccgactatagcaactcccttatcttgagaattagtacgacaatgtacatgaagagcaactgtatccccttcagctactacacgtttaatctctgcagaggaattaggatttttaacaaaatcctccttaaagaaatccatgaaggcttttcgtccatcagcaacaaaaggattatgttacttatactcttcacctacatatttttagtaaaaaactcatagttgaatttaatgtatctaattccttttattatcagaataagcctttacaacaactatttattattttttatttcattaattctgtaatttctttaatacacttaccattatccattgttatatctaatttctatttaaaacccttctttgtacgtttatacctatatatcgtgttaaattgtgtgtggcaagataaaataagctgttaaatttaattattgttaggtagtttctacagtatgatattatcacacaattagttatacatataaaaaaggtttcttgccttgtaacaggaaaccttttatgtattattaacctacaaatctaaaatttcaacaatctgacgtgccttagcattatctatataataatgcatctctaatcctcttctttctgattgaagtacggttcccctcaattttgataaatgttgtgaaacagtggattgggggagtcttaatatttccgttaactgtgtaacattgcatactttatggtgcattaattcatttacaatttgtaatcgaacaggatgtgccattacttttaatacatctacatcgtcttcgtggatttcagatagatttctttcagatattaatgttatcattttgcattctcatttattattaatttctattttccagttatccttataattaatacttatagctaattaccatttgtcctgttgagaaaatatattctctttttaaaacaaaaaggacaccgattaattaaaacgttttttaccgctttaattaattggtgtcctctaattttttgaacaaaatatatcttattttaaaggatattttcaattcttttttctcacgtctagtaaaattttatattttctttaaaattcatattaagaatattcttcaaatcctgaaagcacaagtttgcggcaaacttatgcttcatatcacattccacaccaatcaagctaattaacactatcaatgtagtgctaactatcttaattgaatattagtaataatgagtttaaatattatcaattaactttatattacatgtatgtaaaaacaatgacatgataagctttttcaaatttttctccttgtaaatatttgaaaatagtatttcaatactctccttactgttaatatgcctagaaaaagaaccccatagggttctttttctgttcattccctaaaaatctcatattaataaaaaagaagagggatatatcctctcttcaccaatacaatcgaacatctttatacttaaggaagggcatacattcatcaagagatgaaatgaacaataatagttcacctagtgaattataacacaaatccaattccattaatagataatattaacatttataggataattgtgacagaattgttaagcatcttaatattaaaaggttttatatgtatgtaaattgaaagtggatagtgtaagaataaaatataaggaggatataccatgtttaacaaaaaacaaacattcgtaacaacggtaacaactttaacactaggatgtggacttacattcggattaacaccggcctttgcagattctaacaagatttccgccaataatattcctgttcatactattcagaaccaagaacaagaaccttttactggatatgtcatttcagtagagaacaattatttagtagttgcagctacgcctacaaaagatgaagctcttgcttatcaacatgattggtgggatctagtttctcaaaataagattttaagagttcctgtttcagatgatgaaaactacacattaggtgagaaattaaatgtatatgcagctgcatggactaaatccctaccaccaatagctgttatgcctacaattgaaaaagtatttcaataggtaatatttccaataattaagctatcccatataaaaaggagtcgaataacgactcctttttatattctacattcccttggattccttaccttctcgtacccctaatatttaataacatgcttctttctccctagctaaagatgatatagaggttatgtcactcgcttctttcctttcttctatggaagtagctattatactagtcgagtatcaaacatcatcattattttatagaacaaataagacatcttcttaattcatgctctaattaaaaaagagatctaatacatatctctttataaaacatatttaaaaataaaaaccaaaggacaacaagcatatctcttttgttgtcctttagtttttatcgttgcctattccatattgtactaaattttttattttactctattatagaatgagaataaagtttgattaaaacatcaatctgacttaatttttttcctaccaaactaaattatgctgtaaattccttatccatttagaatatagtatttagtaattcttgttctggactgaattttttagtattatagccatcgattaaacttccttatgtatattctctttataaattgagtaactaaagcatacattgttaaaattcccaataaccacagaaaataataaaatggaagtggggttaaaccaatttgagtacttaaactggtaaatggaagggaaatccctataaacataaccaagcctgtaagcatcaaaactggcctagcagccgtactttgtaggaaagggatatgttgagtacgaatcatatgcacaattaataattgtgttaataaccctactacgaaccaacccgtttgaaataaggattgcatctcaggaatatttgcaccaaatacattccacattacgataaaaatgattatatcaaaaacactacttaccggcccaataaaaataataaaacgaaataaatcttttgtatcccaacttcttggttttattaaaaattcattgtctactttatcccacggaattgaaagttgggatagattatatagtaagttttgacataatatttgaattggtagcattggaagaaaaggaagaaatgcactagcaattaataaacttaatacatttccaaaatttgaacttgctgtcatcttaatatacttcagtatatttccaaacgttgtccgtccttccactatagcatcttctaaaacatgtaagtctttttctataagtataatatctgaactctctttaacaatatcatctgctgtatggatagatacaccaacgtcagactgttttaaggcaaacacatcgttaattccatcccctataaacccgactgtatgaccattcatttgaagtgcctttataatacggaatttttgactaggatttaattttgcaaacacacttgttttacttgcaagttttcctaataccttatcaggaagactatcaatttcataacccagtactggttctcctatatacaagcccattttcctacatacatttcttgtcacggactcgttatcacctgttaaaattttcacttgtactcctttcttttgtagagtatgaagtgcagcgatagccgattgtttgggtggatttaaaaaacctacatatccaacgagtatcatatctgattcatcatttatagaataacttcccactttatcactatttaattgtttatatgcaactgcaacaactcgcatcccctgctcttgccagagttcaattaggtgtttatttctacgctggatttcatctgtaataggaattatcttattattttcttttataaaactacaaattgatacaacttctctaactgcacctttacaaagcattattcgttcgttagcatttttttctataacaactgaaactcttcttctatcaaaatcaaatagacattcatctattttggagtattgagacaaatcatatttactactatcttttacataacgtataactgataaatcaatttcatttttattatttgtatggaagtaactatttatatacgctaatcttaaaacctcatccgacttctctccatttgtatctgtatggcgtaccagatccatcttattttctgtcaacgtgcctgttttgtcggtacagagaatatcaatagctccaaggttatgaatagaagatagttgttttacaagtaccttttttttactcatattaatagagcctttagctaaattagctgttacaatcattggaagcatttctggagtgagtccaattgctatagcaattgcaaataaaaaagcctcataccaatttccattaatacccccatggattatcatgacaataggagtcatgatgatcataaatttaattaatagccaactaactttgcttacccctttatcgaatttagaatcagatttcttgttcatcttaacctgattctttgctattgaaccaaagtaagtatctgttccagtacctacaactattacttttgctgtaccacttataatatgagttcccataaaacagagattttctaattcaattaaattttggatttttctaattttacgttttttgtacatatggaaatactgatttgatttttcaacgggtaatgcttctcctgttagagatgattgatttacaagtaaattttctgatgagataatccgtacatctgcaggcacaatatttccagcagataattctataatatcccctggtacaagatcctcaagaccaatttgtaactttccactttcctccaataaagttctcttattttctttataaggaatatttcccttcctgagaacagttaccttttcatatacaagattttttaatctttctatagacttctgagaacgaatttcttgtatgaaccgaattaatacgcttaacgtcaccatgattcccacaataatagtaccttttatatcattggtaaaaaaagataacattcctaatataattagaagagaaataaacggacttctaaaagaattaaataatgttatataccattttattcttttttgagaaactactttattttctccatacacttcaagcctcttagtagcttcctcgtgagacagcccttgagacgttgttttaaaaaaatctaacgttgatttaacatcactttttgcaatttcaattagcatattataatttttgcttaatacttcctgtttataaaaatattttttattagatctcaacaaatttacctcctatccaaataaatagaattcccctgttttaaaaaaataattataaaactacatttttataattactctgaattttcaattaaattcagaagttcaatagcacttaaatagtattattctcaccataaatagtaatttttatttataagttccctcttattagcaacaaaaaactactatagccataattttcaactgcaacaattgagctagcactatacataatcaaaattccaaatacaattgtaatgataagcgaaaacaccaacggatattccagtaacttgaatacttttttcatttctattctctctttctctatacttccaacgagtttgtctacaaactttgcgggaacgaacttaggtataaaaaaaacttaatataagtttcttataaccctagtaacatttttgcaatggtaaagtacagaattaaccccgttccatcgactaatgtcgtaatgaacggacctgagataacagctggatccagctttaacttatttaaaatcaagggtaatacagatgaaacaatggacgaccaaataacaatgaacaatccagtaatagctacaacttgcgcgacttctgtacctacgcctaaagtgtacgcacgaattaatgctgccacggctaatgtaagccctagtaaaaggcctactaatgcttcttttttcataacacgaaatatatctttaaatttcacctcatttagagctacagctcgaaccaatgtagttacgacctgtgtacctgtatttccaccagttccaattaacaacggaataaagaaagccagtgcaactacatgagttaatgtttcttcataatgccgaagtacagaaccagtatatgcttctgctacaaacagaagtaataaccaacctatacgtttacggtatatttgccaaatagaagtttcgaaatatggcttatctaatggggtgctccctcctaatttttgaatatcttcagttgcttcttcttcgaaaacatccattgcatcatcgaaggttataatacctatcatccgattatccatcgttgttacaggtatagcggataaatcataatccattagtttttgtacggcttcctgttggtctaggttcactgaaactgaaataacatctgatgccattatcgatgataaagttttatcatctgaagctagcaataattcacgaatagaaacaattccattaagctgaccacgtgtatccagaacataaatatacgaaattgattcaacccctgccccaatttttctaatatgcgacagcgtatctttcactttccaattttccctggcagcaatatagtcaattgtcatcaaactgcccgctgttccagattgaaaaaccagcagacttctaattctttgttgagattcttcagacaaaagttgtataagtttttcagcctgaagtggatgaattgaaagaattacatcaacaaggtcatcaatagattgcctagctaatagctcttctcctctatccacaggcaaattggtacaaatattatattgctcctctggtgtaagataactgagaattttcgcacctttttcagtaggaaaacattttattaaagatatctgatctttatgttgaaaaccttttatttccattgcaatatcgtaggattgaatttttataagctcttgcactaagtgtgtatcttttgttgctaataattgttgtaagcattctttcatcgtaattcctccttaaggacagtggtacttggtatcattttcccacttctaggaaaactaatttcttcataaatatgggatcaatatcatcaatcattagtcttccccccttttataaaagatttattacaaataaaattttgcatataaaaaacctcccttagtaattcaactaaaggaggttgctaaaaaagacatagctaaataaagctcattccccctagttgagttttggcactatacaacgtaaaggatgaatcattcatcacttagctatcttaagaagagccttaatccgacaattcctgttctacccattggcatctttcgatatttttgggcaatagcctgtgtttgtataggagcctcacctaacaggtcatagatatctcaaattttttgttcgtttcgtgttaaagcatatctactatttttgaacttgtcaagtaataacagaacttattttttcaattaagacaatatcaacaacaatagtaatttacataatgccaattccatcgtcttacgctatgattggctgaccgtttccatcaaattgtttccattcatattctagctaccgcttttacaacttcaggaggaacattttcttttaataatgcgttatgaggctttactcctcttctaaaatagcgtaataatattcgtcccaccattcattcccatgtggtatacacttcctgaaatagccttctcttctcattccaatcttctccatcactcgatatgatggtatattctgtggctgacatgtagctataattctatgtaacttcaattccttaaacccatattccaatgtagcttgtgctgcttcagaagcatatcctttattgaaatattcagggttgaacacccaaccaatctcataagtatgctcaccaaagtatttatgaaaaactatatgaccaatcaaaatatctttatcaattaatactacaggaaagttcttagcgttttcaccaatattttcatttacaaagttttttgtatcttcttcagtaaaaaaaccttcaggtatgtatttcataacattgatatctgatgtatactcatgaacagcttgccaatctttgaactcaaattttcgtattaataatctttctgtttttataaacatttacttttccccctcaaaaaattgcaactatattttaaatcctcatttaatccttaaactaaaaagaacttgtaggaatctctacaagttctttttagtttaaggtgaatatacgggccaaacaaactatcttacagattgactgtagaaattttaggggtaatgctttgacaaatatattatataacaaatattaacatctataggatttatttttaaaaatcatatgaattaagaaaggaagtagtttttttcttagatactattattaataactgggtatcattatatttcattctgcaacttatttagaagaactatgtacatttcgaagaagtttttcaataagttttgttttttcatttacctttgtggcatatgtgtagagtaaacatccagcgccttattacattcctgtgataggtttccaatttcaattaatggaaaaccgtagagtttctatccttaagttgatgggcatggggcatggccatcaactaataaaataataaaattaaaacacccttgcttgcagtaataaagtgaaagggtgttttaatttacgtctacaaacgagaaaaagcagttaaaataaagtaataaggtttacttcaggaaaataaggtatattatatttgttgagtagattctctttagagacaagaaaagtaggtgaacaaagtgggaaaatatcaattggattccaaaagtcaggtagctgtggcaaagttccatgaaaaacagaagcctgccaaatttgataaaaagcagcaacttgaaaaattgcgtacggagtatttgaaaaagaagcaaaaacaaacagataaataatatgttttattttccgaattttttctgtatgtaacgcaaacaaacacaagaaaataggtaagttattcatcattcaaatatatacaggctattttttcaaacctcttacttatgcaactaacgcatgcgtcagttcattaagaataactaaaaaagtcgattccttgagatgaaaaagagtaaacagtgcccttatcaggcactgttttattttgccattataatttcctccactgatttaggtaagcgatacaagctattccccacctccaaaagaatgaatcaagttcctcaccgcatatattaaactataccttttcttaaggagggctaccttaatgcgtactcctttatcctttgataaagaaactgccatactgttagcttcttgttgtgagttaacgtatgaacaatataaacaaaatggtattttcgaaataccagatggttttcaatatgtacaaggttttcaaggaaaggccattcaaacaacagaatggttcggatttatattagaatctgaggatacaattatcgttgccttcagaggcactcaaacagatccagattggattattgattctctcgtcaatcaaaaaccttatccttatgctttaaatggcggaaatgtccataacggttttctctctatttatgagtcttgtcgtgattctattatggatatgctcgtatcattgccagcacataaaaaactgctagctactgggcatagtctaggtggcgcgcttgccacattacacatattagatgcacgtataaatactgccttcgcacagtatggactttatacattcgcttctccaaaagtaggagatatcgcttttcgaaattattataaactacaagtagctagtagctttcgtttcgtcaacttattcgatgtcgtcccacttctccctccccgaaacataaattttaatgatcatgattgggagtatgcacacgtccatcacaacatgacatttacaaaaaacacaaaatccattacaaataatcattccattacaacatacaaaacatgtctgacttctcatttttaaccagtaaacaattggaaataaaatattcgtatactataataatctatgaagttatttttggatgaggggaccttacatgttaaaatttatcttcgcatttttccttattgtaatttttacggttacaggtttctttacattttcatactttgcgacaggagagtatgatggggcaggtatcatatataccactgttccatttctttcttaagcaaaataaataaaacgagcttaattttattaagcacgttttatttattaatatccatttctgttggtaaatcgataatatatctcccaatatagcaacctctttaaaactgtttaactgcattaccaataccccaaatttcattactgtactgcaaaatcgttcgatcgctcgcaaaatgaccagactgtgcaatatttaaaatcgacatttctagccacttcgttcggttctcataagctctaccgacagcttcttgtctttcagcatatggaccaaaatctcgcagaacgaaatattcatcattttgaataacgagagaatcgtaaattgcttcaaattcggctcccgactgtgcaaagaaaccattcgttaactgatctactacctttttaatgtgcccattgtggtgataataatcacttgcacgatatccaccattttgatagtaatgaagaacctcttcggctgttaaaccgaaaatgaaacagttatcatcaccgacccggtcttttatttcaacgttagcaccgtctagcgttccgagtgtaatcgcaccattcatcataaatttcatattacctgttcccgatgcttctttactcgccgttgaaatttgttcacttacatccgctgccgggaatatatcttctgctaaagaaactcgatagttttctagaaagataactttcatatattgactgacatacgggtcattatttacttttcttgcgagttcatttattaatttaataatttttttcgcgtaataatagccaggtgatgctttcgctccaaaaataaaagtacgcggataaaatgtaaaactagcatcctctttcaaacggttatacaaatataaaatatgaagaacatttaataattgtcgtttgtaagcatgtaatcttttcacttgcacatcaaaaatagaatttggatcaatggtaatccccattgtattatgaatacgctccgctaaaatctctttacgctcttgttttacctctgcaaatttctcttggaaactcgcatcatattgaactaattgtagctcttgaagcttaatcggttctttcttccactctgttccaatcgcctctgaaatgagatttgttaactgtggatttgctttcataagccagcgcctatgagcaattccattcgtcttattattaaacttatctggataaaattcataaaacaatcgcatttcccgctgctttaatatttccgtatgaattttcgctacaccgtttacgctatggctaccgacaatcgctaaatgagccattttcacaaggtcatgtgcaataatcgccattgcttcaatacgatcccactcatacggatactgttcccacagttcatgacagaaacgttcattaatctcttcaataatcatataaattctcggtaataacggtttaaaaatgtgaattggccacttttcgagcgcttctgataacgtcgtatgattcgtataagaaatcgtctgcgtcgttatgtgccaagcttcttcccatgctaacttttcttcgtctagtaaaatacgcatcagttccggaattgctaaaaccggatgtgtatcgttaatgtggatcgcaattttttcatgtagttgacgaaggtcaccatatctttctctatgcattcgaacgatattttgcaaacttgctgatacgaggaaatactgttgttttaaacgaagtatttttccctcatcatgcgtatcatctggatataaaaactccgatacagcctctgtttcacgcttatatttcaaaatatctttgcagttttgcgggaaaggaactggttcagcattccaaagtctaagtgtatttacagtactcgtctcatagccaactaccggcacatcatatggcacggccataatgacttctgcatttgtatgcctaaactctaaacgcccgtcaatttctagcggttcaacattgccgaaataacttacttctacagcttgatcatgccttcttacttcccatacgttttcatgaagaagccactgttctggaaattcgacttgataaccatcaacaattttctgatcaaacaaaccatgtttataacgaattccacagccgtgtcctggcaagtttaaagatgcaagtgaatcgagaaaacaggctgctaagcgtccaagcccaccattaccaaggcctgcatctgcttccacttcttctaactcttgtaacgaaatccctagttcagataacccttgctcgcatacatctctaatacctaaattcaagatgttacttccaagcaaacgtccaagcaaaaactcaatagacaagtaatacatttgcttttgctctccggatcgataactctcattcgttgcaatccattgactattcatatactcacgtaccatatggccgagtgtattatattgatcacgagttgtagaatctttaaaacttttaccatacatcgtctctaacttttctagaaaagttgatttaaaactttcaacatgagtaaacattttttcaccacctacatgttattccatgagacttttatacaattccttataagcaagagccgattgctcccagctataatcttcagtcatcgcttgttttacaagctgctcccataccggtttatcgtgatagaattcaattgcacgatgaatcgtatgcagcatgtcatgtgcattaaaattcgtgaaactaaaaccatttccttctccagtttcttcatcataagaatgtaccgtatcgtttaatccacctgtttctcttacaattggaatcgtaccgtatgctaatgcgataagttgtccaagtccacacggttcaaacagcgatggcattaagaataaatcacttcctgcatacacttgatgagctaattcttcattaaatccgatataaacttttaccttctccggatactcatatgccatccattcaaagaattgctcatattccgaatcacctgatcctaaaataatacattgtacatcttcttccattatttcgcggaatacagtacgtactaaatcaagacctttttgcttcgttaatctcgttaccattgaaataattggtgtatcctctttttctggcaaaccaaaataacgctgcaaggcgcgtttattttcactcttttcatataatgactctgcatcatactgagccttaatatacgaatccgtttctggattatatacgctcgtatcaataccatttacaatgccgctaagcttatcattatattttcgcagtaatccatctaacttctcaccgaaaaattcatattgaatttcttctttatatgtcgggctcaccgctgtaatttgatccgaagcgataataccgcccttcataaagttcacattcccataaaactctaactgctcactgtggaaatattcatcaccaagttctaacaagtcgtacattacttcaggaggaaatacaccttggaactgtaagttatgaattgtatataccgttttaatacgctcatataacgggttatcttgatacttttcacgaagtaagaaattaaccatagccgtatgccaatcgtggctatgaagaacatccacttcaaaatcaaggtgcggaatacactctaacaccgcttttgagaaataagaaaaacgctctccgtcatcataatgaccatacagagaatctctcttaaaataatattcattatctattaagtaatacgtaattccgtcttgctcaccttttaaaattccacaatattgatttctccacccaagcgggacgttaattactttatgtaacgtacatccatctcttaacttttgcggaatgaggctataattcggaagtataatacgaacgtccactcctaattttttcagctcttttgggagcgcacccgctacatcagctaatcctcccgatttcacaaacggtacacattctgatactgcaaataaaatattcacttgttgtcccactgcgcgaaaagtttttattactcctcttgcagcttcctcccttcgagttttcatttgaattaaaactttaatcagtggaggaaaaagcccccactgattcttttaagaataactattaatcgtactgttttgtacgcttcctttttctacaacatacggcccatcggcgtttccttttaatacgacaccgtcaccaattttcacatctttatcaataataacaccatctattatacagttatctccaatttggctcttttgcataataatactgttacgaataattgaaccttttccaattttaactgaacgagaaacaacactgttttcgacttccccttcaataatactaccgtttgcaatcattgtatttttcacgactgcaccctttaaataacgagttggtggctcatcttttactttcgtaaagatcggtgcttctttcttaaataattgcttccaaatagcaggttgcaaaatttctaagctatgtttatagtaactttcaatcgagtcaataattgctacatatccagtatgttcatatgtagcaatgtgtaatgatttcccgcgcttttctctcactacatcaaataaactgtattgttccagatctttatatgactcaaataagtctaacaataattgtttctttaacacatatgtttgaagtgaaaccccttcatggcaaacttccgtaatatcagctgccgtatgtatatgtcgctctaacaccgcttgaaaatttaatgctgttacgagatggctattcgtaataacaacgtactcttctctgcttcttagaaaataatcaatatgtcttctaaagtgtgcaaaagacccaaattcatcttggtcacattggcagtttggcgggaataaaaatagtccgtctcgttttctatctaaatcccactgttttcctgaaccaacatggtccattaacgaacgatttttatggcttgtaaaaactgccacactatgaatactagaattcaccatatttgaaagcatgaaatcaatgagtcgataacggcccccaaacggtaacgccgctagtgaacgatgccctgttactttctttaaggaaggaaaacttcccgttgcattaataattcctaacattttttctcccattcatttcatcccccttttctatttcccttcagcaattaatactacatcgtcaacattcttttctggacgaatgattgttccatcctcgataaccatttctgatccaacaatcgctctttcaatcacaacatttttaccaatcttagcccctggcataacgacagaatcaatcaccatacttccttcttccaccgtcactccttggaataacacagaatgcttcacgtccccttcaatgacgcacccttcgttaataagcgattcttctactttcgccttttcagcaatatattgaggcggttcgtttggattgacagagtaaatacgccaattacgatcgtttaaattcagtgatgtttcatcgcgaagcaaatccatattcgcttcccataagctcttcaccgttccaacatctttccaatatccttcaaacggatacgccattagcttcttcccttcatccaataaaaggggaagtacgtcttttccaaaatcgttactagattcagggtttcttgcatccatctctaaatactctttcaaaattgaccaattaaaaatatagattcccattgatgcaagattacttcttggaaattgtggtttctcttcaaactcaacaatctccatttcttcatttgtattcataatgccaaagcgactcgcttcatcccaaggtacttcaataacagaaatggatacgtccgattctttctgaatatggtaatctagcatcttactgtaatccattttataaatatggtcgcctgataaaatgagaacatactccggttcatactgacttaaatagtttaagttttgataaatggcacttgccgtacctgtataccacttaacccctgaagactccgcataaggaggtaagactgtgaccccaccgtttactcggtctaaatcccacgcatttccgattccgatataattatgaagttcgagtggttgatattgcgttaaaatcccaaccgtttcaataccagaattcgcacagttacttagcgtaaaatcaataatgcgatatttaccaccaaatggaacagctggcttggctaaattctttgttaatgcacttaaacgactaccttttccccctgctagtaacattgctacgcacttttgtttttgagccatcttgttttttgctcccctttctcgtcttcactggtcgtaatatggatacgccaaatggtggaattgtaatctctacatgtgctgcttgattatggtacggttctagaatcgtcttaagacgtttcttattcacttgtcccgaaccgccatattgctgtgcatcactgtttaaaatctcgttataatactcgaaatctggtacacctactttatagttttcatatgtagctttcgtaaaattacatacgataactaacgcatcttcttgtttatccccttggcggataaacgagaaaatactttgctcgttattattagcatcaatccactgaaaaccttcaggcgaatgatcaagctgccaaagtggttttgagcgcttatacaatgctatgagctctttaaagtaatcatgcatataacgatgcatttcaaaatcatgtaaattccaatctaaatcttcaaggtctttccactcatcaaactgcccgaattctcctcccatgaaaagtaatttctttcctgggtgagtaaagaaatatccatataataaacgaagctgagcaaacttatcccagtaatcacctggcattttatttaataacgactttttcccatgaacgacttcatcatgagaaaggggtaatatgaagttttcagagtaagcatatagtaaagagaacgtcattttctcatgaatatattttctgtactctggcgcacactccatatatttcagcacgtcattcatccagcccatattccatttgtaattgaatccaagcccaccttcatacgttggtgctgttacaagtggccaagctgttgaatcctctgccgtcataagaaaatcttcatcctctgcaaacactgcttcatttaactcccttaaaaatgacacagcgtactcattactttgctcttgtccttctttattccagtacaacatgttcgcaactgcatctactctgaaaccatcaatatggaaatatctcatccaaaataacgcatttgaaattaagaaattacgtacctctctctttcctaaatcaaaattgacagttccccatactagattttcttgtacatctttatctttatattcataggtcggtgtgccatcaaacaaatataaaccgtgagcatctttacaaaaatgccccggtacccaatctaaaatgacaccgattccatatttatgacattcgtcgacaaaatacattaaatcatgcggtgtaccaaatctactcgtcgctgcataatatcccgttccttgatatccccaagaacgatcatatggatgctcaacaagcggcataatttcaatatgtgtaaattgatgttccaccacatacggaatgagttcttctgccatttccctgtaagaatatagtgttccatcttctttctttttccaagaaccaaaatgtaattcataaactgtcatcgcttctttataaatcggttttttctttttcttacgattccagtttttatcattccattcatatccttttatatcaaaaactacagatgccgtattcggtcttacttctgcatatatagcatacggatctgcctttaaaatgacgtcaccagccaacgtttcaatcgcatatttatatatttctccttcttcaatatgcggtataaataaggaccaaatcccttcttctgtcacttgtagcatcttatgttgctcataatcccactcattaaaatctccaacaacactcattgctttcgcatgaggagcccagactgtaaatcgtaccccttgaatctcatcttccgtcacaacatgtgcgccaaagatgttataactttcatagtacttttctgtatgaaactcatctcgtttcacttcttcacaatttattacactcaatatgttcacctcacttagatgacagaattttttatactttaactatttctgcgaaaaactgcaatatccttgttaatttataaaaaacattcgtttttttcttaaaaatgttagtttttcttcacatttccgtgtaaaatatcgaattttgacgaatattcattgaaaacgctttattattcttctatatttttaccaattattttttctcaacctttattttattatgtttatcctatttttcatgctattttccactcaaaatcaaaacaaaataatctgtcataaaaaaatgtttctcaatattttttgtcacaatgttattgaaatgcgaaatttaatcctgcttttgaaaagctactttccgaaaaaggagtaactgcaaaagtaaatgaaccgaaattagaggcaggttctgttacagttggcggcgctatcgatgacaaaaactttgctggattagatggtgatttcccgttcattgatgtaactttcaaagtagaaaatgatgaattttatgaagcaaacgctcaattagagtcaccaatttttgtttactggaaacaaggtgaatcagaaccaaatagaatgcgtgtacttcaagatcaaacattctcagttatgtccttaaactcactagtagaaggaaatattaaacctggtgcgttcttaaatgaacgcgaatatttagatgaaaagttcgattatacaaagcttggcgtaaaagtatatgcgactgattcttaccgtcataagtttgaaggctcactagataaatacggatacttcaaactaaatggacttccagttaataaacgcgactataacttatatgtagaggtgacaggacatttaacaaaccgcctaacaacgaaacttggtactgaaaaagacggtaagctgcttggccaatattattatgcaagacctgacgaaaaccttgccggcgatgtaaatgctgataaagtaatcgatattaaagatgctgaaattatcgctagcaactatggtaaaaaaggactaactgtaaaagacggagaccttaataaagatggtattgtcgacgaaaaagatattcgcttcgttgaaaggaacttcttgaaaaaaggtccagatgcatctaaatcacaaacacctgtagaaaaatccaaaagcggtacactggcagatattttaaagaaattaggattaacacctaaaaaataataaaatgaaactttaatcagtgggtttttactgcccggcaaatagcggaataataaagagcactctacgtaaaatagagtgctcttttctataaacgacccttatccagcaaaaggggtatattggggatatacaagggaaaccggaaaaggaatttatattaaattatataagttcagaggtaagaagcagtttcccacctctgaattatttagcaattattatagtactggtgccattgtttcttttaatacttttacagaatgagcgaacttcactttttcctcttcatttagctcaagttctacgatttcacgtacaccttcgcggttaattacagctggaacacctacgtaagcatctttctcgccgtattgaccttcaaggtatgcagatacagttaatacgctgttctcgttgtttaagattgctttagttacacgaagtagtgacataccgattccgtagtaagttgcacctttacgctcgatgatatggtaagctgcatcacgtacgttttcgaagattttgtctaagtcttcttgtttgtactgttcgttgttagctaagattgtttctaatttttgtacaccgatagtagcgtggctccatactggaagttcagtgtcaccgtgttcaccaacgatgtaagcatgaacgttacgtggatctacatctaagtagtcacctaacatgtaacggaaacgagcagagtctaaagtagtaccagaaccgattacgcgctctttcggtaaaccagattctttccaagttacgtaagttaaaatatcaactggattagttgcgattaagaagattccatcgaatccgctatccataatgacgcgaacgatttgtttaaagatctttgtatttttctcaactaagtctaaacgagtttcacctggcttttgtggtaacccagcagtgataacaactaaatctgcatctttacaatctgcatagctaccgctccaaacttttgttggtgatggagagaatggtaccgcatggcttaagtccattgcttccccttctgcttttgcttcattaacatctactaatacgaattcttcagctacaccttggttaatcattgagtaagcgtaactacaacctacagctcctgttcctactaatactacacgattgataccttttttcatggtaatttcccctctctattgttcacatatatttttttatgattgtttaagtaattaattaaaatactaatttaatgttgtttaacttctttacattcatattgtagcacgtattattgtgaattacttcacaaattatgacctatttgtgaactttttcacatagagtgtaaagttattggaataggtgtggaatccatttcaatggaggcgttttctttagattgtgaaagggtttttcttgtggttttcatcggtaagtgaaattatatcggcgatttttagaatatatcgaccgtaactccaaatatatcagcgattattaaaatttatcgatcgtaactcaaattatatcagcgatttttgcaatatatcgatttaccgacaaaactcgacaatactgacaacataaaaaagctgtcttcagtagatcacacctgttgagagaaagcagcttcttctatatattatttattttcatccgtttctccaagtgtaggaggctacagccatacagctggggtaaaagttcaacttgaggtatcattttagatagataattccttcatatccatacaggtccaaataaataacatgattgtatttaccgctctatatacccaactgcaacagcccatacttcatatttcttctatgcataaaaaagcagactatccaaagttcacttttatacaacaaaaaagagatagcagattatgctatctcttttagtatgacccgtacgggattcgaacccgtgttaccgccgtgaaagggcggtgtcttaaccacttgaccaacgggccagttctggcagagaagaagggattcgaaccctcgcaccgcgttcgcgatctactcccttagcaggggagccccttgagccacttgggtacttctctataaatatggctccgcaggtaggactcgaacctacgaccgatcggttaacagccgatagctcatacttccatccatccatcttttcttctttcattcttttctctatcccagggattaaatccaccctttttccattgtaatcatattgaaatcctcccttattctctgcgatttcaaccatatcagaagcaaagttatgtgctttcactaactgtattccatacaaaacaccttcgggtaaaaggctgattaataataaagaaagggtaaggaatagagctgtagttactgtattttgcattcttaatgcacctactctttttctttattttacgtttccacctaattgtttttcttttgcatttgtatcgtagataataatacttcttgctttactctttattgtttcttttttctcatcaaattgcttaaaataactagcagcttccgcatcaccttcgacagcaatcattgctggtttctcctgtacatcatagacagtaaagttacgttttgaagcaggatctttaaaatccgcattactgttatacgctttttcaaactcttttttcgctttttctgcatcaatagctatttcttcttctgcacgaagagtacctatttttacagacttagccaaagctatctcgccacctctttctaaagacgatttattatcggtatgtgttgtatctccaatcaccatatcagttacaaaaaatagacaacctacaaataacagcaacatacttgctgcaacaataaacttttgcatccctcttcatcctcccttaactttcagacttccgaaatcgaaaaccacttaaaatggtacttttcttttggttcaacaattggtttggtagcaataactctgctatttccttcattattccttctagctctttataatagttccgactagatagtaacgtactactatttaattgagattcaaatacatcttctatctcatatggtggtaaagcagttaataccttatctccaaaacattcttctactacttcatgctttaaaagagtaggcgaaaacttattcccaatgattctcgttttctctaaagctaagtaagaaacgagctttctctctttttgtgtaagaggatgcactatctttagcaattgatgcagatctggttccgctacaaagaatatgtaatccgccatttcacaaatctcatggtataaatctttatcccaatcgttccctgcatcaataatagatataggtgcttcttggttggccaataaaaccttaataaaatggtcaaaatcctgctctgtctcgttttttagctcttgatccacaataggattctttacaatataatttattttgccttgcttccattttggaattgataatatatcagattccttctgtagcatctctttatatctctgcaacataaattcactacgatagttttctggtgcctcagtatatccctttaataacggatacgtataaccatcatcatatagattctctatataattcacatcaatctgtagttcatttaaatacgcagctaaaagatgtgaaacaaaagtagcaccacttctcctgttcatgctggccacaacaattgttcttcttggaatagcaataccgatttgtttttcatataccggctcaaaagccaatttatactgtttttttataacaggtgcttttggcatcttctctgaaacggacttacgcttttgtttgtttttaaatagtttgttggaattagagccaggttcactgtcgccgcctccctctaattcacttgatgcttcttcttcatcaacaggaacctcgggcaactttgtttgttgcggtgcctgacttgctcctacgatttccgctacatttttaatatccgattcctgtagtagctgcgggatgactttattatcaatatcaattttacgagagttaaaaatgtcatagatacctagataaatcagtttcgccaaaaactcatcatcattttcacgctctgtaaataccacaatacgaatatcccgattaaagcgaatatctcttaatttctgtaagataatcaattcacgtttctcttcatgtcccgcatcaatatttaatcgtttgtcattaatacatagaatattgggctgttccgtatctagaatttcatctaggtacttgatgtgcatcacatcactatcagctacttcaaatcctgcaccaataaaatcctcacgcaaatatgccgtatatacagtatcgctaatagctaaaacgattttttttgtcataaaatcccctctctatagaaaaacacttttaaagtaataccatattttcaaacggcacctgtgtttcatcttgtaatttttttagtaattcagtaagaagtgcttctatttcaaaacctcctaaattacgtggggcattatcaagaagactgtattttacacggatctcaaagcgatcttgtatttcttctaacggcatgttaccaaataaaatttgctcatacaggaatccttcttgaagatccttttgtatattcgttctttctttatatacaatcgtaacttgcgctaattcaacaaatggattatctaaagttagttttgcattccaatttaaattccagatttcacattgtttttctgcatgtacaacatttgcagtaatagatggagtgatagtaaataaacgatcaataggtacatttgtaaggaaggttcttttcccttcttctatctgcagtcccttctcttctctttcatgttcaagtgccatttctgcaccatataatgcaatttcactaaagatttgttccataagtggcttaattccttcataagtacgaacagcaaatacgctaaactcctgggtttcatctgttctaattaattcataaatattaaattccgcagcatttacaattgcaaaaggaatatcttgtacaaaattaggattagtaaatagctcatctggtattactgtttctggatgtcttagaaactctaatcctagttggtatcccttaagaaatgcatttttactggcagctgggaataaagtttcaaattttttaagatcgtttttaaatttcttttcttcaatttcattaccaaattctctatcttgtaaaatatttgcttgatcagcaattaataaaaaatagtaattaataagagattctatttttgtttcaaaatctgtattgtctttacaatacttttcaaatctttctttgctttcgttaataatttcattcattttttctcgtctccttataaagattatggtttttaaacaaaaaaagacacaccgatggcaggttatgtgccttcggtgtgtccgtttagctaaaaattaaatctattaatttatatatttctcttagttaattgttgttcacatacaagaatacctctatgaattttaaaagtcaatacttttatcgaatccgtgtgaacatatatttactcctttttctctatttttgctatgtatttaatctaaaaaattacaataaattaaatataaataatcacaagtagtttatataagattaacaagatatatatataacttaacacaattattaattataaagagatttaaaaaatacctctaaagtcttgtatcacatacgttccttgctattaagataaattccctatcgtaatatccccaatacaaacaagccatacatcatataaatcacaaaataagaagttaaataccatattactcagaattcacaagtctaaaataatattactaagatactcacaagtaatgaatcgtattataaacaaactgaatcgtattcaaacatagcataaacagcttatatacttgcgtaaaaatgctcgtagctacatgttcctaaacaaaaaagcatgttttcaaagtaaagaacatgccaaataacccttgctttttagtgattttttaacaagggctgtttctatatttttttaaaaatactacataaattctggataatcaccatgttgcctatgataatttgttcttatatcgctgctttctcctacagacaaacttttctccttaaaataaatccaggcatctctaaactgtacacgcatgaatgctggaatagagaatatttcttgctctttcatacaacattcaacttgatctaatgcataagtcattgcatatattaataattcattttgtttttgtattgttggtaaatagattgcgatatcaacaatttcttgtctaaatgcagtcattatattttctttatctttttttcttaacgcttgtcccatatgtttcaaacgagataccgcttcttttctacacttcgctataggtctatgtaattcttttttatcattttcaataacacaattcgaagaaaaaatgacattaaacttttcaataataacttgttgtacctgccttctaacacgtgtaatacgagactcacttggtttcttatctttaggatctactgcattaaatttaataataggctttacaatctctatgtattgtcgcactttctttgcattacgcttcaactttttctttagaaaagccatttttctcgtaatctcgaaatcttcaatcttgtgcttataatgttccataccaatttttctcgaaaatgtgttgattaattctaaaagaaacataattcctctattatctcgagcctttacaaggctacttagtatagttgtttgaattaaataaaatggaatacggaaatacgataacgatatatttatcatatctgtagtttctgcagcagtgtggttgtacaatgcataatctacaatttcataaacagtacgatttccaacaggtgtttctcttacgagcttacgctccaagcaaacttgaaatcctgtataaattgttgtgtagggaatcccacttttcttagcaagatccattatttgaaattcacgtggcagcattcctatatcattgcattcaaagtgcaataagatataagtcgctaatgctgaggatggtaattctttgcgttcattttctagttttacaatattaaaaagtccattaaaaaacttaaccccatgaactttaaagttctgctgagaaaaattcaaacgtgtactcattattctaaatgactccttccgaaaagagcacaaaaaaagacactgtaatatcacatatacaaaaatctacttaaatctagatgatttttgtatatttctagataaacaatgctcaaaatacgcaagaaaatcgcctttttcagttgcacaaatttataagatcaagtaaaattatcttataaatttatacaaatcaaaaaaggttttgaagctaaagtttaatctaggtaatattgtaagtataactttcaatcaataagagtttgttgggttcctagagattaacctcgatgaaatagttggcgctattttatcaagctgaaagatcttttttttttgcttttttatgtttatttttagttaattgcggcaaaactataactatagctaagttttgccgcattttaatgtaatcatatatgcattttttggtacttgcaagacgattttttataaaatcgtcttttttttatataacaatttcctgtttaatacagttatgctattgttctattttcgaaaaaaagaagttttctagttttatattcttaaatacagaaagacttctaaatatattgaaccatatgcggaatataatgaatgttataaagcggtttcaaaactagaaaatatacattccaacattaacaataacccttatataacaacgttttcaaccaatacttccaattctaatttatcataaattagcatagtaaacaaagaaaaaaacatagaaatgattcagtaaagcaaacagcaaaaacatggaattaataataaaacgtatgaattctaagtttataaatttaagaatttataaatcatatgccacattaacctcattttctctatttttgtacaatgaatacgatcttaaaatcaatacaaaaagattactagaataaaagttaaaaaaagatataaacactaactaaaataagttagatgtaaatctagaaaagatcgattctatattgataaaaaccctttattttaaagggttatataccaatatacatattctaattttgaataatagtatttatacagattcctaaacttagtaagaaaccttgtgtttaatcaaacacaaacaaaagagttatttacagctcaacaacatactatttaggtcatttggttcttattatatcaatttcgtatttattgttactcctatgaatcacttaataaatacgaaattcactctattattttctattagtagctaaatctcaaactattatttgcttcatttgaatatatcgctataaattttcttgagtttttgcaaatttatattactcaagaaaatttatttttagtgagcgagaatcggatattagaagaaaaacttgaaggaataatcagcgagttcgagctataaaactagaactaaaactagtataagtttgttctagttttatattaaaccttgataaatcaatgttatcccttgttttattctatctaaattttgttagataaccatatagaagatacagaaaagtagaacgaatattagaatgcacaatactatagataaaccatgttatctatagatataaaaatacttgatttttagtggaattatattaagattttctagtttttctatggtagagtaatctataggaagataatgcccattctatgtagaatataacatggaagagactttctaagttttttggttgtaaggaggtgttgtttctatgagtgagaacaaaacaaacgaagaacaaaatgaatatagaatgaaagaagtatctgaacttactgggctatcgaatgacttattaagagtatacgaggaagagtttaatctacaaataaatagaactaatggtgggcatcgtcgctacacggaagatgacattaataagtttatatctattaagaagaagatccaagaacaaaattggagctataagaaagttcgctcttggttaaatggtgacgagcttccagtagcattagaagaacaccaggttaaaacaaacctagagaaaaaagtagagtatcaaacagaattaattcaagatttgactgaaaagttggatcaaagtatcaaactacaagtggaaatggtaaaacaaatgcatgagctaaagaccgagaaacaagagcttgagcaaattgtggcacgtagaaatcaggatcttatagatactttaattcaagaaaaaagaaaagaacgtcaagaacgaattgagacagaatcaaaaaaatcattcttacaaaaaatatttggaaagtaaactttgaactagattctaagtttggtttatttaagtagcaagtctaaaaatggacttgctacttttttattttgataattttaaagatgttattttttaaatgcctatgaacctattcaattattaaatatcgacattagatttatataaatatagaagaattttaacaaagataaataacagtttaattttcagtttaactttaggtttaaatttagaaaggttttagaaagatatatgtagctctagtgtgacttaaggtttaaaaaatagtttaattcttagtttaacttttagtttacataccatttccattgtgatataaataggttaggtgaatttttccactctcaagaattaataaaatagatgggagttaaacaatgaatagggatcacttttatacgttaaacattgcagaaattgcggaaagaattggtaatgatgattgtgcctatcaagtattaatggcatttattaatcaaaatggtgaagcgcaaatgcttaataaaacggctgtggcagaaatgatacagctaagtaaacctactgtttttgcaaccgtaaatagtttctattgtgcaggatatattgatgaaactagagtaggaaggtccaagatttataccttatcggatttaggcatagaaatagtagaatgttttaaacaaaaagcaatagaaatgcgtaatttataagtataggggaggaattttatatgttattaaacagtaatgaactagaacatatctattcagctaaccatagtgtaaatgatattagtattcgatggggagttattggtgctggccaaaaaggtaataaagaggctgatttattcgctggttacaagttttcgaatggagctagttgctatccgacattagctgttaactttgcagagtcagatatgatgcatttacaaaatattattaaagaagatcgtattcattttgatggtttaaagggagctgcacgtacacctgctgttgtgactgacttatttgacccggaaattaatcctaatgctaatggataccttgataaattagcacaagagctaggtcgaaagtttacaaatgaagagggagaggtaattgtagaccaattcttaatctgtcttggagctggtggtggcgttggaacaggttggggttcacttgttttacaattaattcgtgagcagtttttcccttgcccagtatctatgcttatttccttaccatccggtgatccagatgaaattaacaatgcacttgtattactaagtgaaattgatgaatttatgagagagcaagacagattatttggaaattctgatctaaagccattagcaaatgtaatcatcaatgataatactaaaatgcaacggattattgaaacacaaaagggcacgaaagacctgaaaaatagatatttaaactggaaagaagttgcgaacgataatgtagtgagtacgttacatgaaataaacattatcccagagaactatggttctgataacgttacatatgacccatcggatttaataaaactattaagtattccaggacgtttcttaacaattggaaaagcgagaattgctaaatttgatttacattcacttggaaatagtattaagagaagtttagaagagggattcttctcagcagaacatcaatttgaaacagcaacaatgtatggtggtttcgttttaagaccttctaacgcagatttcttcaaagatgttaatacggaaaataagattcgtaataccttaggagagtataaaagattggatgaaatcgctggtaaatttggtgatccaatttgggataatgaatatgcggtttgctacactatatttgctggtatgacaatgcctaaacgctatatatctcttgcgcgagaaggaaaagagttggctgaaaaacaagagcaattaagagaagaagcacaacgtaaacaggacgaagaaaaagtagatatttcttttgcaacgaatcgtgtacaaaagaacacattcaatccttataataaaaaccaaggatttggcggggcatcaagattcagtggtggtaaaaactctgcatttaaacgtcagactagtgaagttactacaacacaaaatcaacaagaagaagagaatattattagcactcttaaaacttcaaatccatttaaaaaacgttaaaaaaagcgggtctaaacgacctgctttttttattaaaatcacaaccgattacaataaaaaactacaatgcacaaattagatatctattatattttctgcatgtttaacacagatttatataatgtgatagtttaaatagattgttaggccgtcctaacaattttatttcaatcctttatcctttaaaaaattgttcggttaaaacatgtcttccgtccgaacaattttaaaaggaccaaaagactatataaatcaatgtttctagcagatttttaggaagagaagtaatccaaacttcagcgtacgagttttagtatctagattcgtgcaaattcagtttaaacttttcataatttacaacaaaattttgctgtaataagatatatagaaatggttgttatttattgaaaataaattcgagttatggagttgtatataatgaaaagtaaaacgtataaatatacaagtaaaggcacacagaaatcttttcgtttaaaagaggctgatatatttgtattcacatttttatattacaaaaggcatcttactacacgacaaattactcagctttatagtgcatttgaaggtagggatttttctgaggatagtgtgtttacaaagcttaatcgtttttcaaaatacggtgctatcttaactaaaaaaattgataaaagagatgatagtataaccagacgtgcgacattctccttaaaagatagaatggtcgattaccttcaagaaataggacggattcctacaggatcttcaaaacgtagatattcttcttcaatctcgttacatacactctgttcacgagaaacgttagtacgtacacttttagaagtatcgaaaaaaaccaatacaaataagttattatgtgagctagatattcgctcatatcatcaaaaacaaaagaaaacagaaattgaagatgcaggtttactcttaattcccgatgaacacatttcatatcaagacaaaaatatttacattgaaatggatatgtgcaaagaaacgaatgctaccttaattgaaaaggtggggaagtatattgaatatgcacaaaaaaacaatgagaatataactgttgtttttgttatgtatgacaaatcgatgtttcttgcagaagatgctgacccaccatacgtacgtatgaaaaatctcttattttctatgcgagagtatcatgaacttttaatgaatcttccaaatctaaatatacacatctgctctttgaaagaagctggagatgttatttcagatatcattctaggaatagatgataatcaaaactttgaacaagatattcttcaacctttatctcaacgtacagtaggagatgctgactggcgctacgcatatgttgaaaaagtccaaacatttaaggaaacaatagatggcggtcttagacgaacgtatagaagagataaagatgctatgcaagatttcttctttatttttgggaatgaaaatgattaccgaatgattgctagattagacgacgttgtgttttcaagaagagaaggcgatgaaggggtgccacttgttgtgatttatccaaagcgcaacaagggtagagatatacttttaatggacacttatgacaacgtattactgctatccctccaaaatgaaggtgttactatcgacgcagatgaacagatcatggcacgtactgcaaataacatacatccgaaaagacgcaagcttgttgaattatattaatcattaattttttatatacttttatacaattttattgatttttattatttaaggtgatagaattacgtttgaactaaacacaaaaaactacaatcaaatcagaacatatgaaattaaggcaagcgacacacgctgtttttacagtgggtgtcgcttgcctttttttatatggagaaaggtggaaaattaaaatggatttacaatatgcaactactacaactgagggagtgctctctgctagagaagcgtttaaaaaccctgaactagtcctcaaacatatgacagaagagggcgcaacgtttagcgtttctctacaagatatccagattccaggaaaaccgaattactattggtatgatgtaattattgaaacggcatcgaataaaaaaatagaagtaaatattgcagtactttcccaagaagaatataaccaactctgcgaaagagatagtattgatttatatttaaaacaaactgaagacgcagcaaaattcttttttgaaaaatcaaaggaattattccaaccagaattcaataatagattcaagtttaaacataaagctcaattatatctgtaagcggtaggtgagcctatatgcagacatttaaacaacgattaccgttatttactacaattggcttgattagcggatttattctttcatttggatttggtttagtaaactacatcaagttactctactatgcatttgaaccaccgtcttatcctatagaaattacatatgtaccgcttattttaatgttcttctctttacttttaggagaatttagttttaggttttacagccgtattcctgctttgcatgtgaagaatgggaaattaataattttgattgcttctcatattgcagttgatattcaatttttatggtttgcaactgctccgattcatgcaaaggttattccgtatcttacagataaatcaaagcatgttaattttggggagtatgaggccataggtcatgttttaacagggaattttcacacactcactatgatttttgtctttttacctacagtttttatgatcttgtttacactttggtatagtggtcatattgttcgttacagagaagaaatattaaagtgggtacaaaaatacgaatataaaaatcacaagttacaaaaatggtttaatagccaagaagaacagatataccctgatgtggaaattggaccgcatattgagcataaagaaatggtccggattaaggggaaagatagaacgttaaatggtatcattattggtccaattggttctggtaaaacatcaagtttaattattcctatgataaatcaagatttacactggatggtgcgtttcataaataagttcgaaactgcgtataaaaagaacgattatgatacagaagaagtaaaaggaacatttttaaatggtgtcactgttattgaacccagtaatgatttatgtcaaaaggtatataaattagttcaagcacataagattcctgcaagctcggtttactacattgatccaaccaatcctgataccaaaaatataaacattctgcgtggaccggttgataaagtagcagaagttttcgcaatggttattcaaggtttgtctgaatctaacaatgcattctttgaacaagcgcagcgtaaccaccttaagcaacatatctacttattaaaactgcataatccacaaaaagatgtcaccttcgacgatttgatcgagatgtatgtgcgcccataagggtagatttagaattgattaaatagcactaatctaggttaaccctttgataactaaaaattcttttgtttttcagttgacatactaccgcaggtcttttcattttgatttgttttaagtatatatctttttgattatacgaaacaatctgattacttatcaagtttattttatcgttttttaacaaaatggtgtcaatgaaaaaaagaagaaaaatatttgaattttttgtgacgaacttgtaggtttttgtatgattttgtaggttcgcttataagatgtgtgagtagcttttataaattcaaattgaaagcgttcgcatgaaggggatgaacataaatgaaaaaattcggattggcaacacaaatttttgtcgcgcttgttttagggattgtagtaggggcagtcttttatggcaataaaacggcgatttcttatatcacaccaattggggatatatttattcacttaattaagatgattgtagtaccaattgttatttcagcattaattgttgcagtagctggtgtaggagatatgaagaagcttgggaaactgggtggtaagacaattctttatttcgaaattattacgacgattgctattttaatgggattacttgcagcgaatatattccaaccaggtactggtgttgatatgagtaatttacagcaaagtgatatttcttcttataaacaaactgcagatgcaacagagaagaaaggttttgctgagacaattgttcacattgtaccgaaaaacgtatttgaatcgattgcacaaggtgacctattaccgattatattcttctcagtattattcggcttaggagttgcggcaattggggaaaaaggaaagcctgtctttaacttttttgaaggcgtactcgaagccatgttttgggttacaaatcaagttatgaaatttgcaccatttggtgtattcgcattaattgccgttacggttgcaaaatttggtgtagcaacactacttccgctaggaaaactagtgctagctgtatacgtaactgttatactattcgttgtgattgtattaggtattaatgcacgaatggttggagtaaacatttttacattaataaaaattttaaaagaagaattgattctttcatttacgacagcaagttcagaagctgttttacctaatataatgagaaaaatggaagagttcggttgtccaaaggcagttgcctctttcgtaattccgacaggttatacatttaacttgactggatcggctatttatcaagcgttagcggcattgtttgttgcacaaatgtacggtgtgcacatgtcactaacggagcaaataacgttattattcgttctcatgttaacatccaaaggtatggcgggagttccaggtgcatcgttcgttgttgtattagcaacgttaggttcaatggggttaccactagaaggtatcgcattaattgcgggaattgaccgcattttagatatgattcgctcatctgtcaatgtattaggaaatgcattagcggccattgttatgtcgaagtgggaaggcgaattcgataatgagaaagcaaaacaatatgtagaaacagtcaaagaaacaaaagcagcataagaaatcgttaaggagtgaataatcatggcaacattaactgaagttaaaaatggtgttcgaattgaaaaagattttttaggtgaaaaagaagtaccaaactatgcatactacggcgtacaaacaatgcgtgcagttgaaaacttcccaattacaggatacaaaatccatgaaggtttaattaaagcgttcgcaattgtaaaaaaagctgcagcgcttgcgaatacagatgtaggaagattggaattaaacaagggcggtgcgatcgcagaagctgctcaagaaattcttgatggaaaatggcatgatcatttcatcgtagatccaatccaaggcggagcgggtacttcaatgaacatgaatgcaaatgaagtcattgccaatcgtgctcttgaattattaggaatggaaaagggagactatcattatattagtccaaatagtcatgtaaatatggcccaatcaacaaatgatgcattcccaacggcgattcatatcgcaacgttaaatgcattagaaggcttattacaaacgatgggttatatgcatgatgtatttgaattaaaagccgaacagttcgatcatgtgattaaaatgggacgtacacatttacaagacgctgtgccaattcgccttggacaagaatttaaagcgtactcacgtgtacttgaacgtgatatgaaacgcattcagcaatcacgtcaacacttatatgaagtgaacatgggagcaactgcagttggtacaggcttaaatgcagatccagaatatattgaagcagttgtaaaacatttagctgcaattagtgaattaccgcttgttggtgcagaagatttagtagatgcgacgcaaaatacggatgcttatactgaagtatctgcagcgcttaaagtatgtatgatgaatatgtctaaaattgcgaatgaccttcgcttaatggcatcaggtccgcgtgttggtttagcggaaattatgttaccagctcgtcaaccaggttcatctattatgccagggaaagtaaaccctgttatgccagaagtaattaatcaaattgcgttccaagtaattggtaatgaccatacaatttgccttgcttcagaagcaggacaattagaattaaacgtgatggaaccagtacttgttttcaacttacttcaatcgattagcattatgaataacggtttccgtgcctttacagataattgcttaaaaggaattgaagcgaatgaagatcgcttaaaagagtatgttgagaaaagtgtaggaattattacagccgtgaaccctcatatcggttatgaagcagcagctcgcgttgcgaaagaagcaattgcaacaggccaatccgttcgagaactttgtgtgaaaaatggtgtattgtcacaagaagacttagagttaattctagatccattcgaaatgacacacccagggattgcaggagcaactcttttaaagaaaaattaaaagaagaggggggacaatcccctcttttttgtttacaatatagaaatgctatatatgaatagaggtagggatgttatgagcaagtttacagtagcttctaatggcgcattagaaacaacattaagaggagcagaagtattatcaacaccacttttaaataaaggggtagctttcacacaaaatgaaagagaagagttaggtttaaaagggttattaccgccagcggttttaacgttagaagaacaggcacgccgagcatacgaacaatttagttctcagccggatgatttattaaagaatgtatacttaactgcgttacatgatcgaaatgaagtattattttatcgtatattaacagatcatttacgtgaaatgttaccgattgtatatacaccaactgtcggtgtagcaattcaaagatatagtcatgaatatcgtaaaccacgtggtgtttatttatcaattaacgatccatcaggtatcgaagaagcattcacgaatatcggtgcaacagctgagaacattgatttagtcgttgtaacagatggagaaggcatattaggaattggtgactggggcgttggtggtattaacatcgcaatcggaaaattagctgtttacactgctgcagttggaatcgatcctagtcgtgtattaccggtaattttagatgtaggtacaaaccgtgaggagctattaaacaatccattttatattggaaatcgtcaccctcgtataacaggtaaagcttacgatgaatttattgatacgtttgtacaagcggtaaacaaacaattcccgaaagcacttttacattgggaagactttagctctcgtaacgcacgaaaaattttagataaatatcgtcatgatgtttgtacgtttaatgatgatattcaaggtacaggtgcagtttcacttgcggcagtattatcggcagtgaaagcttctggtgtaccgctaagtgaacaccgcgttgttgtatttggtgctggtacggctggaatcggtatcgcagatcaagttagagatgcgatggtccgcgtaggcgtatctgaagaagaatcatataagcgtttctggtgtattgatcgtaacgggttagttacagataatatggaagatcttcttgatttccaaattccgtacgcaagaaaagaagtagaagtaagtgggtggaagcaaaatgatgtgatcggacttgctgaagttgtgaaacatgtaaaaccgacaattttaattggtacatctactgttgcaggtgcatttaaagaagagattattaaagaaatggcttctcacgtagaaagaccaattattttaccaatgtcgaatccgacaccacttgctgaagcaaaaccagcagatttaatcgagtggacagaaggaagagcgttagttgcaacaggaagtccatttgaaccagttacatataacggtgtaacgtatgtgattggacaatcaaataatgcactgattttcccaggtcttggtcttggaacaattgtagtacgagcaagcgtcatgacggatggaatgttcgcagcagcagctgaagcagttgcaagtatggtagatacaagtcagccaggagcacctattttaccagaggtcgaagaattacgtaatatctcagaaatggttgcaattgaagtagctaaagttgcagttgcagaaggtgttgcaagagtgaacttaagtgataacgatatcaagatggcagtgaaagaagcaatgtggaagccagagtatcgccaaataaaagcggtagaaaaggttagaatatagaaaaaaagcccgtttataacaataagcgggctttcgcttttactactgaaaaaaagtataggaagtgtcacctttgaattggaatcaattatggaagaaagatatgtcccttttaattatattaatggtcgttgttccgattgctggggagctgaactttcatccctttaatgatacgtttcgagttagcttcggtacaccgctattcttctttttattattatttttaagaagagtaccagcaggagttgcaggtattcttgttggtatatctgtagtcttattccgagtatgtcttgactggatcatgcaaggttcatttcatatgacagaatcattttatttgcgttatcctgtgttcttctattattttatttatggcagttttttttcgctttgcagggtaaataagttccatcagaaaccaatcattattggatgccttgggatttcaattgaaattgttgcaagtatgtcagaacttgcgttttatcacatgttagtactaggtacaacaataacgatttctgaagtaaataaactcatcattattgctatttttcgtagtttctttgcacttggttttttaaatatgatgaatttatatgaaacgaaattaaaagaatcgcaagttcgaaaagaaaatgaaaatatgttaatgcatctttctaatttatatgtggaatctgttcatttgaaaaagacgttacaaaatgcggagttaattacacaagaagcatatcaactatatcgaaatttacaagtaagcgctgattcaagtagtaaaacagcattgaaaatagcgggggaagtgcatgaaataaaaaaggataatcaaaggatatttgcaggattatctaaactgttattagataaaaatgtggctgaatatgtagaaggacatgagttagcagaaatgattgttagaataaacgagaagtatgctgaaatgctagaaaaggatatacgtttttctaaacatatagaaggtgagcatgctgcataccacgtgtatacagttctatcaatttttaataacctcgctgcaaatgcagttgaagcaattgaagataaaggtgtcattattattaagctatataaaagagatcaacatatattttttgaagtaattgacgatggacctggtattgcacaaaaatataagaaattagtatttaagccaggatttacttctaagtatgatcaaacgggaacaccgtcaactggtattgggctttcttacataaatgaaatggtaacagagctaggcggagaagtgagattagaaggccgagaaaataaaagaggatgtaagtttatcgtttgtttaccggagggtagtttaaagcgggaaggggaatagatttgttttattatatcgtagacgatgatgaagttttccgttcgatgctttcgcaaattattgaagatggagatcttggagaagtaattggtgaggcggatgacggagcttttattgaggcggatcaactaaattttaaaaaagtagatattttatttattgatttgttgatgccgatgagggacggaattgaaacagttcgtcacattgcgtcaactttcacggggaaaatcattatgatttctcaagtggaatcgaagcagcttataggtgaggcatatacacttggtgtagaatattatattacaaaaccattaaataaaatcgaagttgtatctgttgtacgcaaagtgatggagcgtattagattggagcgttctatacacgatattcaaaaatcattgaataacgtgtttcagtgggaaaaaccgcaattgcgtactgaaccagtgcaagaaggaaaaaagataggggatttagggcgctttttactatcagaactcggtattgcgggagagaatggaagtaaagatttacttagtatgctggaatatttatatggtcaagaaaaggcacagacatttgagtttggctttcctgcgttaaaagaaattttccatcatattacgataagaaaattaggggatttagctttagaggcggatattgataaagagaaaaaagcgtctgaacaaagagtacgtcgagctatttatcagtcgttaaatcatttggcttctttaggattaacagacttttcaaatccaaaatttgaaagctatgctccaaaatttttcgattttaccgtagttagaaaacggatgacagaaatgacgaaagatgaactcgcatcttctggtcatacgcgaattaatacgaaaaagtttattcaagtgttgtattttgaggcgaagaggttgatggagatagagtgaagaagatgcttataaataagcatcttcttttgttaaatcaacattttatattttctcgtggagcatgtaaaatgttaagtaagagaaaatggttttatattaaggaagtgtcaaagcaatgagtttcacattgaataaatcgattattaaagaagtgtgcggagagacctcatataaaagaggtgaagcctattataaatcaaataaagtgataatagatcagtacgatgaaaataaagaaatttgtgaggcgacagtaaaagggaacgaggatttccatgttacagtagcaaaagccaaaaagggtgatgttgttgcaaaatgtagttgtccttcattagcgtcttttcaaacgtactgtcaacatgttgcagcagtattaatacaaataaactataatcaacaaacaggtagaatgagctccactagtaacagaaatgatcaattgacaagtggtatgtttcagctgtttgcagacaaaccactgaggccaaaaagtaaacaacaccgttttgatacacgtgaaatattagatattgagtttatatgtacaccagtagctacgagaagtggtggggctcttcttggaattcaattgaaacttgccaaagtgtatttcataaatcatattagagaatttctttctaaggtggagaaaagggaatcttttcattgttcaaatgaatttacatatacaccagatgtacatagttttaaacaagaaacggatgcaattattcagcagctcattaaaatgtatcataatgaaaaaatgtatgaagatacgctagaagtacatgcgaaacaagatgaaagtatgatatttataccgccagcttcgtggaaggatatgctctcttcactttctaaagttgaatatgtacagctgaaacaaaatgaacaactgtttcagggattacaagtttcaaaaggtttgttgccgttacactttgaatttacgaagggaaataatggcggatttacacttcatatagatggtctaaatcgtgtacaagttatggatatgtataacaatgcactttacgatgggaaattatatcacttacacattgaagattgtatgcgacttattgaattacaaaagatgatgagtcgctcaaatagtaatcagttttatattccagaaagtaagatggaacatttcgtcgcgaaagttgtaccaggattaatgaagctcggaactgtacacattgatgaagtaatatcggatcgtgttgaaacaccttcgctaaaagcgaaattgtatttagaccgcgtgaaaagtcgcttattagcaggtcttgaatttcactatgggaacgtcatgattaatccgctagaagaggatggacagccgtctgtttttaatcgtgatgagaaaaaggaaaaagagattttagacattatgagtgaaagtgcctttgcaaaaacagaaggcggttactttatgcataatgaagaagctgagtataactttttatatcacgtcgtgccaacattaaaaggtttagttgatatttatgcgacgacagcaatcaaattgcgaattaataaaggggatgcagttcctcttattacagtgagaagaaaagaaagaattgattggttgtcatttcgttttgatataaaaggaataccagaagcagaaattaaaggtgtattagcggcccttgaagagaaacgtaaatattatcgattggcgaacggttcgtttttatcgctagagagtaaagagtttaatgaaattaatcagtttataaaagaatcaggtattcggaaagaatttttacatggagaagaggtaaatgttccacttattcggagtgtaaaatggatgaacggacttcatgaaggcaatgttttaagtttagatgattctgttcaagagttagtagaaaacattcaaaacccgaaaaaattaaagtttgctgtgccaaatactttaaatgcagaaatgagaaagtatcaagtatatgggttcgaatggatgaaaacacttgctcattaccgttttggcggtattttagcagatgatatgggacttggaaaaacgttgcaaagcattgcttttatagattctgttttgcctgagattcgagaaaagaaactacctatattagtcgtttcaccatcatctcttgtttataattggtttagtgaattgaaaaaattcgccccgcatattagagcagttattgcagatggaaaccaagcagagcgccggaaaattttgaaagatataacggaatttgatgtcgtaattacgtcatatccattactgagaagagatataagattgtatgcaagaccatttcatacactattccttgatgaagcgcaggcgtttaaaaaccctacaacgcaaacggcaagagctgtgaaaacaattcaagctgaataccgttttgggctaacgggtacacctgtagaaaattcattagaagagctatggtctatcttccatgtcgtcttcccagaattattaccaggaagaaaagagttcggtgatttaaggcgtgaagatatagcgaagcgagtgaaaccattcgtattaagacgattaaaaggggacgtattaaatgagttgccagagaaaatagagcacttacaatcatcggagttattacccgatcaaaagagtctctatgctgcttatttagcgaagctcagggaagaaacgttaaagcatttagacaaagatacgttacgtaaaaataaaattagaattttagctggtttaacgagattgcgacaaatttgttgtcatcctgctttatttgttgatgattacaaaggaagttcagctaaatttgaacaactgttagagattttagaggaatgtagaagtacaggaaagagaatattaattttttctcaatttacgaagatgctttccattattggtcgtgagttaaatcaccaagcaattccatacttttatttagacgggagtacaccagcgcaggaacgtgtagagctgtgcgatcggtttaatgaaggagaaggggatctatttctcatttctttaaaagctggtggtaccggacttaatttaactggtgcagatacagtaatattatacgatttatggtggaatccagctgttgaacaacaagcggccgatagagcgtatcgaatggggcaaaaaaatacagtgcaagttataaagctagtagcccacggaacaattgaggagaaaatgcatgaactgcaagaaagtaagaaaaatttaattgctgaagtgattgagccgggagaagaaaaattagcatccatcacggaggaagaaatacgagatattttaatgatttaatatgaaaaagctatgctttcacatgtgaaagcatagctttttgttgtaataattatattttgttttgtgcaaagtaaagaaatcaaatgttatttaaattacttctttgtacctttacttttgtatggctttgcagctgcctttttctttgcacttgattgccaacggttccatcctttacttcctgtaccttgtcctacaccttttttcggttttgccttcgttttactcatatgatcactccgttatttaaaaatcttatttgataatagtcaatgatttagaaaatactctttataaatgactatgattgctttaagtaaaaataaactgcttgaatgctatagtatatcatgaaattgcaagtaaactgaaaggaattataaagaaaatgaaaataataagaaatactgcggattctatattccgaacgatcacattaattattgtgtatacgttagtttcggtcagtgaaacattttttggattgacgaggcagaaaaagtaaagatgttaaattaacaacaatcaataaagccgtaaaataaagaattgaaaaatattttaaaactttttgttgactttctttattttttgtatagaataatcattaataaaatgtttcagagatgtgacaacaaaacgactatgaaaggacgagtagtagtaggacgtagtttaagcgagtcaggggtggtgtgagcctgatacgaagcctattatgaagaacctcctggagttgctaaccgaaatcctttataggaaagtagacttagccgggaacttcgccgttacaagaagaacagtatcgagatatttcatctccgtattgtataagtgagcaacctctgttgctaatttgggtggtaccgcggaaccaaagcctttcgtcccagttttttgggaaagaagggctttttttgttggcttcttttcacaacatccaaacattttaggaggaaaccaccatgtatcaatcattaatgacagtaagagagactcaaattgcaattaaggaagttaaaacatttttcgaggaccaattagcaaaacgccttgaactattccgcgtatctgcaccattattcgtaacgaaaaaatcaggattaaacgatcacctaaacggtgtagaacgtccaattgaatttgatatgttacattcaggagaagaattagaaattgttcattcactagcgaaatggaaacgatttgcattacatgaatatggatatgaagctggtgaaggtttatatacaaacatgaacgcgattcgtcgtgatgaagaacttgatgcaacgcattccatttacgttgaccaatgggattgggaaaaaatcgttcaaaaagaatggcgtactgtcgattacttacaaaaaacagtacaaacaatttatggaatattcaaagatttagaagatcacttatttgaaaaatatccgttccttggaaagtatttaccggaagaaattgttttcgttacttctcaagaattagaagataaatatccagaattaacaccgaaagatcgtgaacatgcaattgcgaaagaacacggtgcagtcttcattatcggaattggtgatgcacttcgttcaggtgaaaagcacgacggacgcgcagctgattatgacgattggaaattaaacggtgacattttattctggcacccagtactacaatcttcatttgaattatcatcaatgggaattcgtgttgatagtaaatcacttgatgagcagttaacgaaaactggtgaagacttcaaacgtgagtatgatttccataaaggtatactagaagacgtactaccattaacaatcggcggtggtattggacaatcaagaatgtgcatgtacttcttacgtaaagctcatatcggtgaagttcaatcttctgtatggcctgacgatttacgtgcagcttgtaaaaaagaaaacattcatctgttttaatagaagtgagagagggtagtggtcatctccctgtcaagtagacagaaataaaaagagtattatgccacggccttttcccgatattctatcggggaaaggcccctttgataactaaaaattcttttgtttttcagttgacatactaccgcaggtcttatgttaaatgttttgttagatttttgacgctttacttactatttgttagtaatttgttttctattaaacttaatgacaaaagagttaagttggtgactcttttaccttccgaattttgtgaaatacccttttcttttaaaagtttaataattcgttgtctttccctttcaactttcaatcgtatttcatagtcaaaatacattttatttcctcctttacattttgggtctgaattttattaacctataattcaacggaattaattgtttattcaagccatactgtccagtaagcataatcatcttcatgcatttcctcatattcatcaggcgtgtattgtgtatgtaagcatttatcagaacaaaaatattctagtccctcgtgtatacaatatccttcaaacataactttattacagcatgtacactctctgtaaaagtcctctgtatcagcgaattgagtataaataatagtaatttcaagttttttgaaactagacttgtgaattcctgaccaagtataacgataaacttcattctttgggtcttcattgaatacaatatttaaatcatcttttttataattgttttgttgtaaaaaattgctaatagtattacaggcttttaaccatgcacttccataagcataaaatgattcagttgtagagcttgtaatagcttctttcggggatgtgtttttaatctctaattgataaaaagataattgtgataagaacataaaatttcctcttttcgtagtagtgttgataggtttttctctgttacctgttgccttatacgtaatgagaagtgatcggaatgcaagggaatagtattaaattttttagaattgatgttgagttgggcttttacaagtgtagaaatttgctaaacttacaatgcaaattgcggagcgacgtgaaagcataaacgaaacacaatgattcaaaaatttaatgccccttgcatgaagggaaggacgaattactatacggcaacaggtttcggtacgaaactgatatagaaccttattaatgagaaaataatggttttatttttaatagaaataaaaattataaaaatttttatacccttattgcctatttggggtaataagggtataatttagcctgaagatcgcaattgggtttgtaaatcaatcctttataccctttttggttattttatttaaaaataggtattatctgatcttactaacttattctaaggagggagtgaaattatgtttactcgaattcaacatttattacaaacgctatttactgacatgcaaagtacatttatttgggcattcattattggtggtttagtttgtggtctaatgatttggcaaggtgacgagcaaaatgcacctaaatttaaaaaaggtcttttattctgtggtgctggcgtagtagtcttcttacttgctaaaccattcgttgattacatcaaagctggtctataaaagtaggtgaaaaaaagtgatagagagctttagagaaagaaaggatcgattaaaaggggaaggtaaaattgaacttctccttaatatcgattcaaaaaaatatttagtaggtaaaatttcattttgggatttagtcatagtatcaccagctttactaatatcaattgtgggcatggtgattttttataatcagggaagtcttacaagagacacagctttaatttgtcttacaccaacgattacgttaacagcatttcagttaattaaacacccgattagatcaaatatatctttcttacaatatcggctgatatggaaatttaaatatcaaagaagacataaagaatttttctataaaaagggtgacattaatatgcaacaaaatgatcaagacataagaaaagagttaggtattcgtgatattttttcgagttgctatgaaacaaatgataatcgttttgtcaaagtaatagatgtatccgctgttaatttatcattaatgagtagtaacgagagacaaaaaatatttacttcctataaaacatttattaatgaattgcaattcgttaatgagattcaaatatcacaggtggctcagcctgttaatttatctaaacatttgattcatgtggataatattacgcatggcgaaaagaatccagcaaaacgaatgcttacaaaaagctataaagaatacgttgaggggattcaaaaaacaagagatatggttgctagaaaacgatatgtaattattgatcagccaattggaaacaatcgtgaaaaatcattaaatgatattgaaagaaaagcgtctcttgtaaccgctaaccttgaaaatatgttaactggacatgcaaggttgatagcaaaaccactaaataatgaggaattactacaattaatttatacatgtcttgattatgataatgcacagtctgttggtgaatttattatcggacgtgcccataattctttagatatatcattaggaagtgaatcggctcagaagttaattaatcagcttcaaaaacaagtggacgaaaatattaattaatgaggaagatggtacatgaaatatagttttaaaatccctaaattatttggttcgaaaaaagaaaaaaacaatttcgctcatacagtaggagatccaaacgaacaattactaacagcgattgctccttcacatattgtggagatggaaaacggggtgaaattagggtctaaccatacaagaacgttgctagtgttagactatgaaactattatccatcaacaaagaattcaagaattgaatgagttatctgaaaacgttagctttacttattatattaaggagtttaattcggctgaagttaaagaacaactttcaaaatcagttaaacaaaataaaatcaaaatgaaatctcaacatgccgatgcttacactgtagcggatgctgaagcacaggttgattcagccattcaaatgttaagagatatagcaacagctaatgataagatttatctatttcacacgtacattcatttatcttgcacgtccttagaagagttgaataatttaacaacattaataaaaagtagaatgggtgcaattggtacagcacattccccttctatacgtgctttagatgcatttcgtgcttttttacctctcgcaaataataccattccggaaatgacgtacagaatgatgaactctgaagctgtatcgtatttctttccgtttcatgaaaatgaaatgttttcagaaactgggattgtaaatgggaaaaatatgacaacaggtaatgttgtaattgttgatgatgaaaatttattaaataaacatgaattcgtaatcggtatttcaggttcaggtaagtctacgtatttgtttgctgatatgatgcgtaaatggcaatttggaagaagggttattgcaattgatccaaaaggtgagtttggaagcaaatttaaaaatcttggcggagaatgggtaaagttcaaattacgtggaggtaatagaattaatccctttgatcttccaaagattacttcatctacagaggaacttgatgctggaagtgttttgttagttaaaatcacacaattattaactatgtttaggcttatgtatccgtcaatgacagatttagaagaagatataatttctaaaattgttattgaagtatataaggacaaaggcattgattatgatacggatactaccaaaattggtgtaaaagatgtcccgattatggaagatttgtacaataagttggatgaatataaggaaaaggataaagaattgtatgctgaaattagaaatttccatacaacattagaaacatacacatatggtttgtatagtaatttatttaatggctatacaaacgtaaatatttcgaatgatttaattgcttacgatatttttgatttaaataataacgaaaaagtccaacgtattatttattataatttactgtctcataccacatatgagcttcttaaaggagataaaaggtcaacccaagtttatatagatgaagcccatgtaattgctgatcctaaagtaccactagctatgcaatatgtatactttatgatgaaagtcttacgttccttcaatgttggaattacaccagcaacacagtccattaaagattttatgagtgcaaaagatgaaaagcgaaactacggtgaggctgttattagtcaatctgtacaaaggttatatcttcctatgacacaagaagaggtaacttatctagaaaaagaattatctcatgagttttcagaacaggagaagacgaccttagttgtacgagaaggagataaggataaacaggctggtaaaggcattctattctcagggtctaagaaaatcaaagtagaagtacaactaacgcctttagaaaaacaattatggtttgaaaataaaaaaatagaagatatagcaatatagattggtgagatttagatgaatagtagaaacggaagttacattacttatctattgtttaaaaacccgtatattttagcgttttttctattgcttgtttttacgttcggattaatgtccatctttttctttgccgatgctggaagtaaagataattcccaagataataatatgggcaatggaagttatatgtgcacagagggacaagtaaatgaaggtgtatatatgaaggcctttgaaaaggctggtgtgtttactggaaaggggaaagattttattcaaattgctaggaaaaataatattgatccagttcttcttacagcaattgctttccatgaaacaggaagaggtacatctaacgctgtgaaaaataaaaataaccccgggggaatcatggggaaaggcggtttacgtacattttcaacactagatgaaggactagattatatggctggaaacttattcagattatatatatcgcaaggacttgttacgataccacaaatcggaaataaatatgcgcctgttggagcttctaatgatcctacaaatttaaacattcattgggttcctatagttacaaatatgactaatgaattaggtggtttatcaatgaattgtcaagcggtgggtcaaggatctggcggtgtagttatagatggaagtggaaatcaaatttttgatcctaacgttgtgtataacagtatggcaaaattcttagggcaagcatatgtgtggggtggagcatccccaacaggatttgactgttccggtctaatgcaatggaactttagacagactgttggcattaatctaccaagaacagccgaagaacagtatcatgcaacagcaagggtcagcaaagagcaacttaaagctggtgatttaatattcttcaccggaacttatgtcgggaaaactgttacacatgtgggaatgtacattggaaacggaaaaatgattaattcgaataattcaggtgtaaagatagatgatgtcttttcgccttattggggaaagtattattatggtgctggaagaataactcataaataaaatatgaggttataaggtgaaaaaaatgaataaaagccaaaagaaaataccgattataaatttccttttaattctatttctggttatttcatctctttattctttctcagtttataaaaagaataaagagataaataatgatattcatttattagaagaaaaattaaaaaaggaaaaagaaattagtgttatttacgatagatcaaaagagtttattgaaaagtctagtattgctgatcatggggatatgttaactggacaagcaaaggaaatgtttgaagatgcaattaagcaaaaagagcgtgagggtgctgaagacagtcgctctcactctattttagaaagaacagatatagatcatatttttgctgtgaaaacaggagataatacagcgaaatcatatgcaatctataaatctatctataattcgaatccatacgcaacagattcaatgccccagcaagtaatgactttaacaatgattgttgattgggaaaaagttaatggagaatataaagtttctgattatagaattaatgtcttaaaaaatagtttggatgattatctaaaaagtttagaaaaataatcttaaaagctggtgattattgtgaatgacctatcagacaaaatttctactttttacttttcagtaaataaaaaggtaaacaatttaattgaaaaaactatagatcaaaatcttgataaagaaaaaaagggcttttatagattgtatcaaagagatcctaatgattctgaaattctcgaaattaaaaaaactatcataatgagaaaaggaatttcattatttgctgtaatctttttaatcatgatgggtcttataagtattgcaagttaaaggagaaaccgctatgaaactaaaaaagatgtatcagatcttatctatagttcttttaatatttgtcacaatgaatattaatcttactacagcgtatgcaaaaaaaggtgaattttacgatcaaaataaaaaggctattgaaaaagaaattaaaaataaagacaaacaagagtttataaaaaactatgattacaaagataattactttgattgtgggacatttgatgtttcttgcaaagtttcgggattggcttatgaatcaattattgggacaataaaagtaacatatgatagtttgaaatcaactgtaattaaaccaagcgatataacaggaaataaagaatttaaaaaatacaaaaatgcatttaatagcctatcttcaactatgttagctatattcttgatgtggcaaatattaaaaatctattccatgcggtatgtagaacccgatggggatggttttttggtaatcaacgaaaaaatgattatgactcttacagctggggtgctattaggtatatatgatccatttataaattgggtattgggatttcaagaagtaattgtaaaatccgttttgtatgaaccaatcaaaatggaagaagtcgttttaatgatatttataaaaggttcattatatggtttcttcattgcattgatagtaatgtttgttttgtttgtattcgcattggcgtttatgtatagatttgttttgtttggactattatatgtcattggagttgtagcgatccctacagcactaaatgatgaatacaattacttctctttatggattagattatttgtaaataatagtgttacgttgtgtttacaagcattaacgttttcattaggttttatggcgctagtaaagaataatgcttttggtcatggtgtttcatttacagtagcgtttgcattctttattttggccttagcaattcctcatttacttggacaattgggagcaagtacaggttctagtagagcaattggacaatccttacgttacctttcaaggagaagataaaaggagaggactttatgaagataaaaaacataatacttgttggtgcattagcatttaccactttagttggttgtgaggatgcaaataaaaaaacagaaacaaatgaaaaagtattttttagcgaaaatgatatgaaacaagcaaaaaacatcatagaaaaggtattttacacatatgaaaatcatcaaaaacaattaacaatggacgagtttgaagaagcaaataagtctattgctcatgatatatccgaacaattaaaagatgcgtactttgatgatgtagaagtcaatatagtaaataatcatcatgaacgttcaggaaaagatgattttttagaagatcctaataattgttataagaaagaagaaggagcaatgctaggtacgtatgatccagaatgctttttaacttataaatttgaagggaataaggtgaaattacaatctcctaaaattgtatattataaaaatattaatgtgcatgagttaattattccaatgacttatgaggggaaagatttaatattaccctcattccattttgtaaaaaccaaagaaggaatgaaattaattcaaggattagggattagttcaacgatcttgaatgattttaaaactttagaagataaaacagaagaggaacttaagattgaaaaacaatctaaaacgctaaaagaaataaagatgtataacattttttaagaaatatggtggtgatagaacgtgcgagttaatattaataaattagcaaacatagaaattgaagataatacactcaaatatcggattccaataacagaattaaatcaagatgatcttaatattattgaaaaaaatcttaaaagaaaaatacagagtatagataatgatccacattatttagttccatttgagatgcaaatattaaatgcatctttaatactttattatgacatggagaaatataaaagttttgaataccttagatcgttagaatttagtgagcaattaaaatatttttcatccatgattcaaatagctaaaaatagtgtgcatacaaaaactttatggaataaatataattttgttttagacgaatatgaagacaagatgaaagtagttatttatgaaacaactgatttgaaaatttatgacataaaagactcactaattggcgttaaggagttaattttgttaagtctaacaaaattaactcaaatttatggaaaaccacgccgtacggactttatagatcctagtgatgaaataattcaatttgcggaaaccttgttacaaattgatgatcttgaagatctagatcattttgttaatacaaaaatgatccaatcagaacactttgaacctgaagaaacggaagtagaagaagaaaaggttactaaggataaaaaatggagtttaaagttaaaaagtaataaaaatgatataaaaaaaagagaaaagaaacagcaacagcaaaagaaaaagaaaaaaaataatagcaaaaaaacctatatcatattaggtagtgttataatattagccataggtttaaattttgcccttacttctttaaatgatagtaagagtgcggaaaagaataagcaaaatgcaaagaaacagtatcatgctgaagtcttaaagaagaataagcttgataataaaccattgagccaagacgaaaaggataaactgtttgatgcatatcaaacagctttaataggcgaaaatcagaaggcaattgaatcattagaaaacattggatatgaaaaccttcgaagcgtagaccaacaagtattagataatttatacaagaaaacggatcaggtatataaattatttgataagaagccttctcttgtaaaaggtattgtaaatgaaatgctggcaaataataaaggtgacgaattattaaagattcaagagaaaatggaatctaaaagtccatatgtagattttgaagttgcatatattaataaggactggaaaaaggttgttgaattaaaagatgaagtagatttaaatggaagaagagaaaaacagattgtagaagcgtttacgtctctgaagaaatacaaagaagctaaagattttgctcaaaaggtcggaaatcctgtattgttagaagagataaaagctttctctgaatagaggtgtgaaaaggtgacattattaaaaaaaattgatcatacaggtagaattactttgccaaaagacttatgtggcaaatttggtttaaagaaggatgatcaagtagaaataacgcatgatgaacagtttattaaaattagaaagcatcaacctgagtttgtttgtgcggtgactggtaaaataacagatcaaggacaaacaatcgggaacgcttttatttcctacgaaggcatagaacaaatcctacaagagcaagagcatttaaaagaaaaagaaaaaaagtaaaaagcaatccctacttatagatagggttgctttttacttttttatttaattagttttagattcgtttaccgcaataatattacattttttcttaaaccttcttttaacttcttcttctaatggtagtgttatatttttctctgagaaagctttaactgtgtgttcttgcacttcagtatggtcttcaatctgatatgtaataatataagttttggctttaaatttattcatgtgtccccaatccttgtcttctatttagtattaaatttgattttacgtatgtaagtcggtagaatttggtttatattaccacttgaattaatgcaattagtagtttattctataacttatcaaagttcaaaactattattctgattataatgatatatgtatttcggaaattatcactctcctattattactcaaacaattaaattgtagatttcttctcctgtatactaaaatagtacatttaccaacatcttattaaattttataaattctagtataacttgattataaactacatatagtttataatcaaatacgaatgtaaaataaatatggtttaaattataaataatgaaatatatagatattttgttattagagaattgttaaattggagtcgaaccctgtttacttttttttagttgctttatttagttctttttttgtaaatttaataactgaagactcaaaccaatatggagtttcagcaataataatatccgcatcaattatctttccacgtttataataagtatggaatttcccctgtgaatatggaactccgctctgagttaaatattctgagaacattttttgattatatattttttctttatgaagatcttcctcagaaatttttaatatgtctttttctgatattaaatttgtatcttgttgaaagaatttaataatagtttgtagtgcaaataagagatcattatcttttaaatgtgtatacaatgtattcatattaaatgaatataaacaaggatcgttaataaaaagtgacagttgataaaatgtatcttcaacattggtcaatggacatagagcaccgttcattctttctttaacctttgggtattttttataaatttcttcaagagattttttcaacagagttcccccctttcgacacatcctcataagagtaatgttcaaataaatgtgtatgacttaacttttgaaataccaatttaatttttccccaatcgctttttttcactcaatattgttaaacaaattttgtttaatttttttacagttttatttcctacaaaaaaatattttccattatttttatataattagatatatatgtaagttttaagtgtgttttataagaaaaaatacgcttttttgtgtactatttcagagtatcaattgatgtttataaattcaacaatatatgtataaaaaataaacaaaatatgatataattttaaaaaaggaggaatctacaattgagaacattttttgttaaaagattgtttggttatcccttattatacgctttcatttggtattacctatatcaaaattttacagatttgtatttcgttaatattgctgtaaggcaaattaacagtatcgtaagagaattcccttttatttatagtaacatgagcacatattttatattatttggttttatatttggatatatttactccactatctcaacgcttgtaaaagcaagagaatttagaggaatattgtttgtatgtgtattatctactaagacattgtttgccattataacaattccctttggaattattatgttttttgtagagtgtatgtctcttattattattatgacaagtttatttctatttagaaacatgaaatatagatatctagtcaattaattatgttcgtgtttcgcaaaaaaacatagatattaaaatttcaattaccgaaatgatactataaaaattcgaggtgaggaaggtgaacatttttagggggatttacgaaagattatttatagttatttcgattacccttatggtgatcctttttttatgctgttatgctggaattatttatcctgaattaatacagagttggtggaatcttatatttgtagttattatgggatatttagttttaacaattttgttctttgcatgttataaggatgaaaatcttgctaataattcaaagaatgaagaagaattttagggcaaggtgaataatgcatatgaacaatattttatttgcttgtattatgttgtgcgtaatgggaattatttgtaaatgtcaagataaacatgtacattttcgcttgtttaagcatgtacaaaatcgattttgtacatgcttaaacaagcgaaaatgtacatgtttatcttgacatttacatgatgtcttccttatcccattttaagatactgtgtaataaatatgtgattactctgcgggcgagtttattatccaaatcttctttccaagtatttggagggaatcgtttccttttgccatccaatatttcttgataaatttcttctatcgtaactgctttcattgccaatatataaatcctcctatatttgtatttatatttgtacaatatcactatcagaattattatatatatattatataatttacataaaattatcatcgaaaacaacacataaattagttttttctcaaaaatctaattattacacaaataaaaatttatttaaattttctattttttggtatatacttaaaaatgaattattatatttgtatattaggagtgtatttgtatggagaagcttaacaaaagcgatatcattcgcaccgttccacaaaatggtttctttggacatccaaaagggctatttaccctattctttacagaattttgggagcgattttcttactatggaatgagagcaatattactttactatatgtactattccatttctaaaggtggcttagggatggatcacgccacagctgcatccattatggctatctatggttcgttagtttacatgtctggcattattggtgggtggattgctgaccgcctattaggttcaagtagaacaatattttggggtggcgttttaataatgattggtcatctcatcttagctctaccaggcacggttagtacattatttatctcaatggtatttttaatacttggaacagggttattaaaaccgaatgtatctagtattgttggtgatttatatagcgaaacagacactagacgtgactcaggtttcagtattttctatatgggtattaatttaggggctctattatctccgtttgtgattggaacactcggtcaaaagtataactttcacttaggttttggtgtggctgcaattggtatgttatttggattaattatgtatgttcttacgaaaaagaaaaatctaggattagcaggaacgcaagtaccaaatcctttaacagacaaggaaagaaaaaaggtccttatacagtttagtattggtattatcgcaattgcactagttggtgtgttaacaattccaacaggtattttaacgattgatcgatttactttacttgtaagtatcttaggtattctaattccaacaggctactttgtctttatgtaccgtagtccaaagacgacagaagttgaaaaatctcgcttaattgcttacataccactatttatcgctgctacaatgttttgggcgattcaagagcagggagcaatcatcttagctagttatgctgatcaacgtacgcagttaaactttgcaggattggaggttcagtcttcatggttccaatctttaaaccctatttatattgttttactagcaccagtatttgcttggctttgggtaaagctgaattcacgccaaccaagtacagcaaataaatttgctatcggtttattatttgctggtttatcattcttagtgatgattattcctgcatatatccatggtaccgaatcccttgttagcccaatttggttagtcattagttttcttctagtcgtaatcggggaactttgtttatcacctgtaggtttatctattactacaaaactagctccagcagcgttctctgctcaaacaatgagtctatggttcttaaccagtgcatctgcacaagctatcaatgcgcagcttgttcgattatataatcctgaaacagagattatttatttcggtgtaattggcggagtatccattgttttaagtgttattttatatttcatggctccaaagattcaggtacttatgaaagggattaaataatagaactgtgccaaaaacttgttaccatgcaggtttttgtgcacagtttttttagtgctttatcgtatgtaaaactagctccttttaaacgaagaactacaaaggtaaattgatcagaagtaagtcatttatcgatatggatgattaggagaaagcatttacggtaaccccaagtcgagagtattccgatactaatatagtttatacatctaaccctatttaataggttagtgttgaaagatggaactcccgcattcgaaaatgatgtacataagttttccaaatgggcagcttattttttgttttggggttacttcaatatctaagctaaatgcctatggagcaaaactaaaaaaagacgccaaatggcgcccccaacttgggttaatgaggttttagttttccaatctaaagaaatatcgtatcagctcacaaagagagtatatcataacatccaagagaaataatatgcattcttacatatcgaaataaattttgtattcttgcactgacggaccaggaatagcaagatatgaagcatataagcgctgtaaaaatatcaattcatagaagcgattaatttctgatatgacatgttttaatatcacaaaagccatcacgaaatgatgattgcatgatggcttttgttgttttcttatttctttgtctcattgacccatgtaacgatgtcctggatgacatacgcaggaacattggaagggacttcgtattcactagggtgactgaattccccgttgccctccgtgaagatgtgattcaatttcggatattctttgaactgaacattactgcggcttgaaagcccttcttgccatctcgtaaaatcgtcttttacagttacttgataatcacgtgcgccttgcagaatcagtaatagctcttttcgtgatttcacttcctcaactggacgccaacgagtcacatcatacatgaaatgtggagaaggataattataaccagctggtgggtgatttggatcaaaagtaggatccttaatataagcgaattgtttttttagttcattaataaaatccttaggtgccccgaggtactgatactgatcaaggagcatgtcagtaaaaggacgtgcaggaggtgccattaaaatacttcctcttacaagagatgaaggtgctttgcttagtatacgcggcatggtcccagctccttggctatgtccgagaatgaaaatgttacctgggtcaataccttcctgctgcgctgctaatttcgctgcatatatggcatcatctgtagtatcttggtctaatgtagcaggttctgcactcattttaaaaccgtgttctaaggaacgtttctcgtaacgtaacactgcgataccgcttgatgaaagaccggctgcaaggtctctaaagattttagctcccataattgtactgtcacgatcttgcggacccgaaccgtgaacaagaacaacaacaggcactttttcgccaggtttatgttttggaaccgttaatgtggctggtaacgggtatgtagtatttccaattacgatttcacgttcttggtaggaatcaggttggtcataactaggatgcgggatggtataagatttctgttgcatcgtccttacgccaacttcatcaactttgccgccaggcgtgaatttaaggagtagtggaatagtagttccttcgatagctcctggaatttcaaccgtttgatggactaagtttcgttctttaataacaggtgttcccatgcttgtaatcctgctcccgccactttgtgtccaccagttttgtaatatgtttgccgtaaacttggattgaaaagcagcagacgtcaactgaagtgcttctgcatatttaccttgctggagatagtcaaaaaataatgacgtacgctccgttaaagagacttgtttcttttctgcagtttgtgccccttgtgtatccgcatgaatggttgttgtaagcggaaaagaagaaatacctaaaaaaaagagtagggtaaaagaaagtgctgatttttgtaacttcttttttttcatcctgtttaacctccaaaatgtaatggtatgaaatggggatggtaattagtggaatgattccctattggggtttcggtatatgtatgggtgaatcctgcatacatatcataaaaagtccgtatgaaagagtagaagagtccagcaatggatgtttttcatgttacaacggataaggtagaagttcaaatgcagtttaaagatgctgggagtggaacggtggaatggattatgtgcgactggaacacaggtcaaccgttatatcaaagtgataaatggaatgcttatagctaattacaatttataattatcacatagggaatagatactagataaaaagaattaacactcaaataatttcaaagtagtatattgattttaggcaggaaacattcaatacgcatacttgggagagtcgacatatggacttagaattaaaggtaaagaggaaataaatacatactacaaaaactacataatgatgaatatccgtacgactggaaactgggtcgtatagagaatggggataagtttcgtagagaaggtgaagtgaaaataggatctagtttaatagagtaaatgcacgagcaggagttgcttggtacattacacaggtagtcttcatatagaatggaattttatgtaccgattactttaggaaagcattctgtatgcaattcaaacaaatgcaaatcaaatcatgcatttacagatacaaaaaaggagctgttagtaaagctaactgctccaggtcaaggaatctccaaggggaaaagagaaagactaaggactttaaatgagttttggctaatgcctatccgtattattgacggaataatgagttttattcattcgtaacgaaattaatgtgtaagtatgttacaagaatagtccaatacctatccatgcaactcctaatatagacaatgattcgataataattaaacgtttagcctcatcttgttttggtgtagttagtttcttaattagagagaatagtccacttattccgcacaaagtaagagctaatagtagtaaagtacttgtcatcctgatcactcctagtatttggatattcttattgtataccaagctacagactaaaaaatagtaatgttattgtatcttttctatgaagcatgtacagtgtgacgtgaatcttcaatggatagaggtcgtgtaaggtaaccttcagtattagaagtatgaatattgcgtgaaaggaatgcagactgttgaaaatataaaaaacgtatagtacaataagggtgtaagctagattataacgaacaagaagtcgggtggttctgattctcgttctattgataggtcgtaagctttttgaaaagtcttggtttggtcaccaaggctttttttcgtacgcagacaggaataaaagcactgcatgtcgcaatactatatagagtagtaagctgggtttcaacgtctttgcacttcaaaatgatactgcattggtcgtgtgcaatgaaagtatggtcagtacttcaccttggaacccaatcataactacaaactggtcttagtgtcgctacttatagcggcacctttttatttaagaagatgtcttacatattcagttatacccttacctatttcacttttggtaaaaaagtaatgtatatttctaaggaaactgaatgctgtaacgattgtgccaaaagaaaaaagacgcttacgtttcttttctctctctgaacgtttacgggtggttctagtattctccacgttctattgtcacctcctctaaaaagagaagggcaaagacggcacgtattcagtgtacagtgtttgacaaatctctacaagaacttattttctggtatggaacattcaaatatgtaggatcaatttcgagtaagatgtttgaagaaacgtacaaaggttatatgtactgattctcttttactagataaatagtatcagtggatttacgatttttttcatgttgtaattaagataagttaatggagggaattagatggttcataacataatacataatagatttaaactacgagaaatcgaagaaaatgattggaaggatatacatatatacacatcaaagtccattgtgtgccgataccaagcatggggccctaattcggaaacggaaacaaaagaatttgtaaaccaagttcttcaagatgcaagtaaggtcccgagaagtcgattttcttttgcattggttgaattggattacgaaagagtggtaggggcaggtgagattaagattcgagattttactaatagggagggaaaaatagggtataacataaatccagattattggggaatgggacttgcaacggaagtagcaaggttgctgattatatttggatttgaggaattaaatcttcatcgtatttttgcgacttgcgatccaagaaatataggttcgaaaaaagtgttagaaaaaaatgaaatgacgaaagagggaaggattcgtgagtgtatattattaaaagatggctggcgtgattcccttctatacagtattttggaacaagaatggaaagaaatgaactaataagtgtatcctttgcgtaaaagtactgcgtgtaattgggctatttagaggaattaaactataaaagaataaaatctatattctttatgagtgcatagaaaaaagtgagggagaacctcactttaatttttcgttattttcttcttccgctggtacttctcgaatgattttctaagcggcagcacgtatttttcttttgtcatcgtttgtactccttgcataatatcttaagaatgtagaatgtacaatacatgtaactttctatttattatttgaattcggtactgaaaattctagcctatctaatatgtaaaatatgatttctagcaatatagtagataggctagtgaaaatcaaaacagcatgagatgacataaccacgaacgtaatatgtaaatcgaatagcccaaaatactctacatagaatgttagaaaagtagagaccatcgacaaattacatcaaaaaatataatcaaaagcaatgtaagtttgaggtaaagatttactcaataaaaaatagagatgcatgaaaggcgtgggaactaataaattattactaatagatagaaggcattgagctcaaattaaataactttattgttgatttttgagtacaagcacattgatgcaatagtaatttaagagctgcgattgtagctctttttcttatgtagctaacggtgcagttagtggaagaaggattttaatttaatatgatgaaatatgtaatcttctaggtgaaatctaagaaggaggtttaattactataaaaaatgatttgtagaacgaatgtaagggaggaaagctaacttggaaatcacaacagaaagattaattgttagactttttaagagtactgatttacaggatgtatttgctatttataataatgatgatacctaaagaaatacaacgatatatgttacctatagatgtttcttctaaaagtgcaaacaatgaactagagctagcctttgcaaatacgaaggaaggaaaatggttgagggataacacacagcgagcagggtttatcattcgttactcaaaaggtaaggacagtataacaggttatgcatatgaaccttggcatattcgttatgtaggagatatcgctgagagtatatatcaagaaaagctaactttagaagaatatatgaatctaaaaaaataaagaattgatttagcatatatcatgatgaatgcggatgtacggatttgcacttacatgaagcagaaagcatacagaatgaggatacaccgagtggtaaagtaggggaggaatttgacttgaaaaatggctatataaagggatttacaataaattacttttaaacagtttacataacatatctaatagggatttataaaaaacaagtgaataaatctcaaaatgaaaagaatacttatatcattgagacagaaagaaaaatttagtagttacattttgaaatctgcatttaaataatatttagcggaacgcttagctaaaccgactacaataaaaagaattaaaggaaatgctctatttcgacatcacaacaattaaattttgaaaaatacaccaactatttagttttaaggagttaaagcaaactgttttgcattaaaatgttatatattggataagttctataagcaagcatttaatcaatattaatatgtatagctgactgtacccgaaactaaaagacattaatactgatgaaaagtaaggtatatgatagctttataaaagggtggaaaaataaacactcacaacttcgcacgaaataccaattttacgaacaataagatagttaaataaaaatctaatacagtatttaggtattttaagctcgttagcatgaatttctttatatttgtatgtgcctatataattcatgctttatatagaaatcattaaatgctaagttagtcattaatattttttatagtaaattacattttaatttataagattttttcttaagttcatctaattaacccctcataatcatgcttaaattaaccaattcatgttaaataacgaattttaaactgtttttatatattaattttttgtatgaatttatatataaaaattgttttattttacatgcatttatatgtaatttttgcactgaattttatggtcttatacaaatttatcacatagttagctataattttcatttgactaactacactgtaccattcagttttgaacatattttagtatttcataatttaattatgtaaataagtttgtgtaaaaattgaatttaacgcgaacttgtgttcgcctcttttttctgttatattatatatgaggtgatttttatggactacagcaaacaacgtcaaaaatccgtacatcgtaaaaaattatacgaaaatcttaatgaaatgcccttttacatagaagaatttgtggagtacaaagaattgcatgatgcctctccctccaccctactgaattatgtatatgattttagagtcttctttaattggctattatctgaacaagttattgaattaaaacccattaaagacatatccttcgctgatttggagaatttaaagaaaaaagatgttgagaactttatgagatttctaaaactacaacagaatatgcagaattcttctgttaacaggaaaatttcagccttaaaatctttatttaaataccttacctccctatcagagaacgaagatggagaatgttatttttatagaaatgtaatggctaaaatcgaaattcataaagataaagaaacattaaatgcccgtgcaaaacgtatgagatctaaaatatttcataataatgatgatcaagagtttttaaattatgttaagtatgagcatgaaaaatctttaacaaaacatcagttgttctatttcctaagagataaagatcgcgacgtagcaatcctctctctttttcttggcagtggcattcgtgtaagtgaattggcggatcttcgcatggaagatataaacttaaaagaaagactcattgatgtaatccgaaaaggaaacaaagaagattctgtatggattaccccaattgcattaaatgatcttgaaaaatatatggaaattcgagataacaaatacgctccagggaaagaattaaaaaatgtgtttctatcaaaatataaacatactgcacagcctctttcagttagggctatccaagatatagtagaaaaatatactaaggcttatggaaaaagaatgtctcctcataaattaagacatacattggcaaataaattatatatggaagagaaagactcattacaagtcatgcagcaacttggacatacgagtcaagatacagctttgctatatacacaacttggggaaacaactattaaagatagtttaggcagaataggaaagaataaggaataaaagttcagcaattttacattgttgaacttttatctttttacatacttaagatttaaacgctatttattattctttttaaatttgattttattatgtaaaaaatacataatttaaatccttctataattggtatatacatactctctcttgatggatatacatgaaaattttagattcctacaattgttggttacgttaaactcgaatttaatgtgaaattgttttctttgttatcaacagcttctctagactttatatggacctcttatttcccctctactctttcaatataaaatacaaacttaaaattagattacgaataactcttttattactatttatatttataacttgtgtagagcaaatttaagtaaagaatccagaggcaataattttggttctgatgcaaaaacactttactacaaccatagaactgcaatatcctgttaacagggagattaaacagctaatccaaacaatctatgaatgaattcagcttcacttcgggcagatttcaccctttagtgaagttgcccttttttcatcatatgcatagcttcgatgtcacttaaaattaaagtagctgtacgaagtgaattcaatcctaacatagaacgaactcgcttcttgataaaacgatgatcttgttccactatgttattccagtatttctgttgtctaagttgcatactgtcaggtatgcttttcgcctttttcaattgttcaattgctataggataagctggattcttatccaccgtaatgacgcgaggtttagaaacatgaaaagaccgcaaagctttcttgaagaagcgctttgcagcctttgtgtctcttgtttcactgagataaaaatcaatcgtgcttcctttggaatacactgcacgatatagatacatccattgaccttttattttgatatatgtttcatcgactttccatgagtcatttattgtcttaagatgacgccgtactctttcatctaattccggtccatattgatgaacccaacgcataatcgttgtgtgagccatcgataaaccgcacttttccatcctttccactacattacgaaaactcaagttgtaccgcaggtaccatctcactgttaacaaaataatgtttggttgataatgcttccatttgaaaaaacttttccttttccatccgaatcacacaccctttctagagtaatagtatcagtatgtccaagttttatagatttattgtaattattctgaagtttttgcaccagaatcctataaaatgactcaatttcaaaaccactgtttccaattgaagttataataattcattataaaattcttatatttaactgtattgtaacattcgacatgcgcaagctattaatttatatggtaacatttacctgtaagacgaattattaatatgggaggcagatttattatgaaagcaagaaaaccaaaatcatttgtaaaacaatgtacaggaatcgcgttggccagtatgattggatgtagtggtattggagttttcgcaacaagtgtaagtgctgccgaaaatactaatccagctcctatgaaccaatctcttcaagcagaagtgatgactattacacagttacaagatgctattcagcataaaaatgatccttttattaatcaagtaaaaaaatttattgataaacacaaggcagaatcagaatttttatgggggaaagtgagtacttcattgaaaaacgacattgtagacttactcacaggggacaaaaaaaattactctaataaaattaacagagcccttgtaaaacactttagagaagtccctaaattattgaaactagcaagtccagaatttaaaaaagaaattattcagttactaaattacctataagatatatattaagattttatatttcaatggattttgatattagtagttccataaatttgtatttacaaggtacctttcagttaataaaatttatatataaaaatgtataaattaattaggtgtaaggattggaaatagatttaaatgcacatacggtaatcaaatttccatgttttaaatataatctgtcgggtaaaagactggcgcggtatcaattgtgacccgtttccagcctctccccataagaactgctcgtgaggttttccctcacaagcagctcaccccataaacttcatcaaaagggttatgagacctatcaaatggccgagggtttggcgcaaatggaatcagattttgtgggtcatgttctgataaattcaaatgcgtctctgtacggactacttcgtcctgtgtttgtgttactaagatttcttctcttggtttaatactactgtctttcacttcacaagctctttcaatcctttggtttgcttgtaaacgcgtatctccttttccgaatggcgaaatacgtgacactgtaccgtctgttgttgtcgcaaccatgtaactacgatctctttctaccaccatttgtacattcttatagccaccttggtctaaatcagacatatagaagtgaccattgtctaccttgtgattgactgtaagtggtggttcattaaataccggtttctgttgtaaaggtctttgattttggtttcctactaattgatttggatttacattgattgagcgattaatattgattttgccaccacttgaatcttgtatataggctggagatgctttcgtaccattacgatactgcgttaattgtccgtctgaaatatttaaatcctgatataccacttgtccagagcgtatattactatctccactaccataacgagatacaacttgcttcattccactagcgtcttttgcttcaatccatgatttattatttgtcgtcacaagacgtactgcaccttttacaaccgattgcgcgcctgtatgatctgttgttgttggtaccattctctgaatctcctgaatctcttttgcttctgtacgaactgcactgttatacggattatgtttacttaccatacgtgcagttgcttgataagcacccgcaccaccaatcacacctgcggcgtaacttaagccttttgtcacattatagtggcgctctgctgcattcccacctaatgatgtattaacagcagcagtagtcccacttatcactctttgtactgcattccctccggattgttgaacagcactcgcggcactaaagtatgcatttgataccgtatcaatgcgatccgcaagcataaggtgtttcgcaccttccattacactcatgccaagttttgtactctgctgtgtcatacgtcccactgcagatgttgggatagacattttaccagcactttgtgcaatatttgctacacttgttgatgcatctgcataagagcgttcaatttccgcaacggaaagatctcctgcacgtgcgatactggcttgcgttcgtgtcgctgcatatactgctttattgattgcgctacttgttgcaacgccatgtgaacgaacaccttgaatcgcactagtaattccagaacctacttgttgactcaccgttccaagacttgcatggctttgtaatcctttcgttaattgcgaagcaaaggcatctttattaatatacgattgattatgtagactcttaccactcgtatcttttgcctgtacgggcatcgctcctgcttgtactgccgcttgttgtgcgactgctttaaattcatttcctttttcattcaggtgtgactgccacgcttctaatttttgctttggatacatagttggagacaagtttttcataaagcttgccttgttctcagctgcatatccttgtttaaaggattctgtagaagcttgtaccaggttcccaacattacttacttgttttgcttgctgacctcctgttccatttgtcaaaccgtgcgttttcacaccgttgactgcctgctgaatgcctgccgcactggatatacccatcgcatttaagtcaggatctttttgtaactgttgtgataaatgagaagcgaaagcttctttattcgcatagtttgtaccatctttttgctgtacaataccagctgattccgccgcttgttgtgcatgattttgaaatccttgtactttttgacctaaatgtttattccatgcggcttctttttcttgctgcggcatatctgcagggaattgtttcatgaatcccgccttatggtctgcactatatgctttcttaaatgcagcagtagaagcaccgacaagagcaccgacttgtcccatattttgatggccactttctaacgtttctccttttacatcctcgactgcttttccgacttttcctaatgcaagccgagaagcaaacgcatctttattcacataggacttatcaaacagattgtttccttgtttgtccttcgcatcaactggcatggctcctgcttttgttgccgcctgttctgcgtggtttctaaatccttgtacttttgtgttcaaatggtcgttccaatgtttctctttctcttccgctgacatattttctggtaactgactcataaacgtatctttatggtctgcctcataccccttttggaatgcattcgttgcagcgttaactaaatctctagcatttccatatggtgtagcggttttctttatattttgtaaatcttgtttccgctgatttgagaaacgagacatttgatcaccatttgttttcgctacttttttagcaatctctgcatcggacgcaccagggaatgcttgttttaagcgactcgcaactgcagaatcaggattatccgctttccaattttcaaaatcttttgtagctaaatcctgtgcgatatcttcatcggttagttccggatacgattcgccatttagatttgaatacgtgtccgcacccttctttatactcgaaccaatatgttttcctaaggctacagccccttcgccgactgcagcaacacttctaccagccactgcaccaggagcactacctaatgcacttccaacttgcgagcctgctaccatcgctcccggtccaagaccagctcccgctgccatacctgcaagtcctgtcgctgctttaccaattgaacttccaatttgacctgcttttaacatacgagctgcacgagatgttgtaccaacatctgtccctaaatttgctcctaatgcatttttcgggttatccgcatcttctttattatctttctctccatctttcttttctttccctttatcttttgcactacggtagtcgtcacgaacacctttaaccaaaccagccacacttgctaaagcacccatacccatcatcgtacccgctctatgaataccagcggatgcattggtgctaaggccaataaaacttttcacaatttcaccaactgggataaacatggcaagcaatactaattttatgataggattttgtgcacctccaataagtgtaatgactaaccatagggtaattgcgtgaatcgcttgaattaatactgctcccataaactcacgaatccaatataacgtctgttgtttcttttgcgggaacaaccacattcctaccattacagggcctagtaacattaatacgtatagtgtcacagcacgcattaaataataaaagtttgcccatatcattaatccagcttcaataaatagtccgaatatgataaacatataatcatttttatggccttccattgaaagttctgtaatcgtcttattgtcagacagtccagactttaataaaggtatttgttgatccgggttgaaattcccgttatttactccatttatcgcctctttaaattccaatgtaatccaagaatttagatcaaatacaaaattataaaagaaatctaaatgccagaggcaaatcgagataatcattaagtcttttgcatattcaattaatgccgtgcgattatttggattcatagtcgttgctgaatattttgctgctgtaatcactacactgacgaggacacaaaaagcaacaaatttaaacatgacaggcataccagtatctaatacattcgtaactgcattctttgcatataaaaaatctagattagatttatctccaccaaagactagaactggaatagtatccataaatccataaataggcgctagtagggcctttaccatatggataacaaggccaccgacccaatctattattttctcaagcataatttcaccttcctttacaaaggtacgctactatcctgcgtacccttgtactttcttcatattgtttagaagctcttgaagtaccgcttcattcgattcaataaacatcatttctttatctgatggatctgtttgaatccaaaccgaactatctcctacacggaaaatcccttctccttttcctggattgttgagaataatatcaagctccccagcagttaagttaaagttctcttgaatttttttcttatcaatcttattttgttctaagaagaaataagagaaagtagattgcaagataccacgagcttttacattttctaagatacgaacaaagtcctgacttgcccaacacataccggcatttcttttacgtgaacgacgtgctactttttctaagaagttaaccgtttgttcataatcgataaactgccacatctcatccacatacagtacttttcgtttgatagcatgttctggactcttaatccaatgctcccaaatatagttcaagataacgtggaaagcgattggttttaaaaatccttcctctaaatggctaatgttgaaattaacaacgcgtgattcatttaactgtgtttctacaccacgaccaaaatgactttgtccatcaaataatggttttgaaccatcacgtaagaacggacgaatcgcggcgattaactcttctgccttcacatcatctccatgattttctactatgacatcgtagatttcttttaactctggctctggctttcttacttgagactgaattaattgtccatccaccttcttcacttcatctgtatataaagaagaaggatgtgaagtaataccatgtttatcaaacacttcacggattgcatcttctagcattgtacgttggaatacatttaatcctggttgatcaaaatcttgtccgcgtataataatgtcaaagaatccgagtatttcattgattttctctagaatcggtacaaatcttacatacttcacgccatcacgctctacgagttctttcttatcgtattgttccagcgcttctagttcttcatctttatctgtaatttgcagttctgttacagcgattgcacaagggttaataatgatattactttctggtgaaatgtttaaattaataccacctaaacgttttgtaatttttacgaattcaccttctggatcgataatcattgcatgtgtatctgcaagtgacgtttcacgagctagcttcatttttaaaagtaaacttttcccggaacctgaaattcctgtcacaccaatgttatagtttggtggacgataatctgcattcccgaatgaatttaaaaattctacttggccagtaattttgttctttcctattggtatcccaccgttaaatcttccggatcctgatacaaagggtgcaaatgtacatagagcacgtctatcgatatttcgataagtatcttgcagcgtatttggtgcacctaatggcataaccgctttcaaaccacttttcacacggttccaagtactcgctatcttaaagtgagatgcttgcatttcatcttcaagatattcacataaaacgtctaattctttctttgattctgcatacgcaacagccatcgtactcaccatataagagtcgttttcattgaactggatttcatccattaaattgtttgtatcttgaatttttgcatctaagtctttttcttggtcaatgtttcctcgtgtacgttggaaagaaagattggaacgtaacattgtcagctgcatatctaatgatcgcattgctttagcttttggctctttatgaatatcgatcatgacatccacttctccagccgaagttaacatgttgagccaattggtttgcatcatacgtgggtacccatcacgtggaatataaaacggacggaagaacgtattgcttcctaaagattgtttaataactccataatcttctgcatcaattttcataccttctggagcaataacatcaaacactgttgtttgattgtctaattgcgtcggtacttcttcttccagctcttcctcctctagctccaattcatccttctcttcggcttctacttttttcttttcttttttcttttcctttttcttttttccgaataacttcatatttacgccaccccattatttgatttttctgctttttcttctgctagcactttcttcattaactctagttttctttcatttgtttcccctgttgaatagagcgagaaattctcgttttcaattaaatcctggaaacgagcttttacggctttccgacggttaaatgctacgtataaaagttctattaatttatctttcgttaacatttctacattaatttttgctttcgatagtagatttcgggatgcattataacgacgatatagttcgttaaatgccttatctacaatcttttcttctaattcgtcctctgtatcagccgtaatcgtactaatatcaaccttatatggataaattaaataacgtttttgttcatatcgaggttgtgaacgctgccagtactctaagttatcgataacttcttgtccatatagaaccgtctctggtgtaaggtccttcgcacctttcatcgtttctgtcatttttcgtacaggatctgttaaatctacgaacttactttgaatatatactttcgtattaaactctaatgtggttaaccatgattcaattttgatatcaatcgcttcttgttccatattggaaagtaagtaatagttaaccggatgtgcttccgcaattaggacaaatgtgtcatcatgatatcgaatcatgtgattatcaatttccttaatgtcttctacaaaatcccgaaagaaatcaacattatcctcatcaatttccgattcagcaggtgtattctttttgtttttctttccagatttttcagcagtatgtttctctactccaccttgctttttcccctttttcttagaaccaaacagcggttttccattcattttccgataaaagaaaaaccctacaatggctatcgccgcaaaatatatcatttccaacatttataaattctcctttgcccatgtagttggctcgtacccttttctccactttcctttttcggagcggctacgcattttgataagtaaaaatctatcaagatacatgtgttgtttttctttataaataaaaccaaacgctattacacctactaccgttggtagtgctaaaattaggcaaataaaaaacgctactaccgcatcaataggtgcaaacaactgccataaaaatggtacatataaataaagggccgccccgccacctaataaataaatcaattggcgcttacttaatacacctaacagcgttttttgttccgaagtcatatcaacaggaacagttacttttctcattttgtttcctcccttgtataagagaagctctccccaaatggaggagagcttgtacaaactcttttattagattgttgtaacccaagcagcaatgtcgtacgctttgatcatgacaaagcctccaattgccgcgcaagctaaaccaatcatagcttgtgtacggttttcagggttctttccttgtgcaccagatagtttaatagctgcgaatacaacgcaagctgccacccaaattcccccaaaaccaattaaagttttcactaatgtgttcatgcttttttggacagtttcagcattggcaccactgccactaccaccaagacctttcgtaaagctactttttgccagtaagaaatctcctactgatgttgtcataagttttgcagacaaccaattcaacataattcctgcacctccggatgtttttgctcgcaaaacgcaaaaagaccccaatacacgcacacgtcccctaaggacatggcgcatattgaggtcttctcttatatgcgaactgattaattttatattttattgtaaaatcttattacgtttatattatagcaatacgattttaaaaatacaaccccttatttacacctttattactttttatgctctttgttaggatcgtaccataccatttgaatttgaaaaatatcactgtccgtaagacctaaaactttcatttcttcattcaatgagcacgatggttctatttttatagattttgtacttttgtctctaagtgtatacacatgtacataataaccttcttttttattttgcataataacatacctcttaacgtccttaaatatataaaaattacatattaagtatataattattctttctcttcaaaaaatgaatctaatgcatctaacgaaacaacttttatttttttcgcttttcttaacgctgcctctctaggggtaattataatttcattactatttaaaatagattgcaacacatcgtatattttatgtatttcactttcatttaccttgtctatcatttcatgtagcatatccctggttaccttcatatttatttcctcttccctcgtatatattctcttaatttcattatagcgtattgaatttttgatcccacatcgttttttctgaatggtacaatgtagaaaaaggaggcttattcatgggtgacttaattggcgatatatttgggggaatccttatgtccattccttcaaaaaaagaaaaaatgattcgtaaaaactttaagttattgaaaaatgaaacgtggtttaaagagattgaacaaagatacggtagattaatgttatttaaccattccattagagaatttgttaaaaaagaggatcttgaggcaatcttaaaggatgttaagaagactaatgaatttcgttatgaattagagggaatcctaaagcaagaaaaaatatagttgtaatcacaaaatgggcatcaatcaaaaataataaaaaaataggtaattgtttgtaatcacaattacctatttaatattatttatatttactctttattttttaaaatttcattaacctcttccacacttaattcagtggcttccgctactttctcaataggtataccgacattaattaaattgtgaatcatctctatcttagttgcaattctagtctcttctgtggcttttttggtagctatttctgcggcctttttcgcagctttttcttctgccgtttctatttctgatattctatcttttattgctttttctctagcctcatataagcgtaaaaaatccttatcgctacttaaacgctcccaatcctctattgcctttttcaaaactggatctttttccattgctatcgcctccaggattgttgttaatctctcatcctcatgcgcaggaaataataataaccaacgcgctaaagagtcttcccatggattcattcgttctccttgccattcttgaattacttttggaatttcaagaaaatgcaactgcatattttctgtaatgatacgcttagattttttgttcatcactgtattaacattatgaaactcttgctcttctggaaatagtatgaaatctactatattaatacaaatggttggtcttaattccgtgtacttcatcccttgagtcatttgggaataatacatgcctgaccaatagaacaaagagcgctctatcatatcttttttgtctcgaacttgaatctctatatttaattttataccattattcagagtagctcgcaaatctaaaatagataatttatcacccttctgctctcttggaagatgcggatcatctaagtgcaaagatgtaatttcttcatcaatagatgattgtagtaccgcattcagaaaccctattaatatatcttcatttccttctactccaaacaagcgcttgaaagcaaaatcaactcgtaaattcactagtttttttttcatagatgtattcatattctcttctacccttcttttagttaattggatataagaaaaagatagaattaaaaactctatctttttcaatctacctatttatgaaaatatcaacctactttataactttcacaatctctgaaatacaggtttaaatcccgcttgcattgtatcatccagccccttaccttgcgttgggttccatgcagctatgattacgttatagcccaatcgctttaactctgtcgcaaagtctataagagctttccttactttttgattctctactaaatcggcatcaaacgctaaatagacattttctacacccatatcctttaatacaggcatagtaattcgccaagcgtttacaccaggaatcgcaagaaccgtcgttcctacttcaataagttctgctttattaaatcgctttggaatcaaatcagcaatcaaatcagctttcatgggtccttctgtgatcattactgatttagtttgatgcaatgtaccagaattccaatgttttaaatgagaactcggtaccgctacatgtacaggaagtggattttcactaccacctgcaccagtcccctgatttttgtttgctgatgagagccacagatacttttgccctttatgtatctttacaacaatttgtccctcttgaaatggtatctctagctttttgctcacttctagttcgccttcaaagatacaatcaccatttttagttatctttacaacattaggctgttcgattaattccgcttgaactccattgggtgccgatttcacatgaacggagtttttcacttcatccacacgaacctgccatccaacaatttgattgtactggtttcgaaaagggatcaatataccaggagatcctgacatcaaacgaagagaaagttgacccttcctcatctcataaaagcccggaaccccctgccaacagtttttattccccatctgtttaaaatgctgttcccaaacagtcgtatacgtattatccttctctaacacaatttgttgttttaagaaagatcgatattgacgtacttgtatttgttcctcgctcatttttctatctcgtaataaatgtgtatgatgatgctcctgcaatggtatgaaatccattaatttccgattaaacacatctaattcctcattgcttttcttatcatgaatctgaacttcatccgcctcaggcaatcgatacttatcttttccatttatgtagtgaatgtagcttgggttgcccgtgttttttccgtaaatccatttactttctacacgtgtacatgctaccttctcttgcgaaacatgcagcatgcaattacctgtatcatgacaaatcggacacgtaacacggtaaaattcccaccagctacctcttggataagcactcgttaaacgaaattgacctttttgaatgttataattcattattccccactccttgtatactgttaattatatatggaacagctacttccattaaactctttatacttctattcagatattctctttgttctcctaacggatatacaaaagaatatgtatcacaaactaaataatcgtttctatgttcttgatctagcaaagctgattctacatacgattcaaatgctctagcaaacatctcatgattcgtagaccaatactttttggttctcttcttatctaactgaatggctgtatcaaagtatacagaccctttcgcttgataagatatttcattaagtttctcgcctgtttttttatagtgataagcagccaacatttgtgcggttttctcaaattctttttcaactttacgttccatacgcgtcttagctgcccctgataaggtatccagctttctgtacgaacttaagtgataggattctagaatacctgacacattccccttatatacatcataactattaatgacgctaccatagaaataccactttctagcatgggcattttccacattaattactctggccacttttccttgtttacaagcatctagcacagcttgcatcctatctttgataatagcaggcaaaatatttccgatactcttcccacttgataggaaagcaaggctaccatttttaaaatcatgactacaatcatataagaaatgatccagtgatgtgtagcatcctcctgcgattagcaagagggtagctactgcccatttcgggcctttgataactaaaaattcttttgtttttcagttgacatactaccgcaggtcttatataaattaatttcaactcgtaaaaagagctaaattacttgtataagtatataatatttaaaactataaaactatatatttttagatattatttttatgatattaaggtcgtaaaaacgaaaaagagtagggtaaatatacctattattatagtattgatttccgttatatacattagtataataataacgtcagagcatgctctgaacagtcagcgttataggggtataacagacaacattcatttttcaaatcataaaatcggattcacttatatgaaaggtaagaaccctcctacaattaggagggttcttattttttctagaatatagctgaattattatgtgttttttgatattgaaatattacaatgaatagcctaaaagagcctcgactttttttgtataactcaaattctcatgtatgaattattggcatctgttaataatgctagtattcaaatccattataaatataggcactatctatgaaaagctcaatatttctcttataatataaatatcatcttataaaacactaccaatattacatgtgaaatcatgtgaaaaaggaggattctcatgaatgatatatccttgaaaataaacaacactcaaaaccctcataatgtagctattaaaaacatttcttccgtatttaaaaaagaatggcttacaagttatgattaccaaaaacagaaacctattcactatcaaagtcaacaagcaccagggcatctctttacctcacaaactataaaaccaattctttatctaacaaaattaactcacgctgctttatatgaagatcacaacctagtatcctcttttcttaaaaaaggtgatacagcttggaaagaagttttaaaatacaaccaaaacggtggtttatgtatttacgcaagtgttttactttactatttgttattggaatccaatgaaatatctaagaatagattatcctttatgcaaggctattatcatcatgaattccatgatcaacatatccttaaaaacatgtatcaaaacggagccttcggacttcattcttatattctctttgaagattacgtaattgacactactatccatcaagtcgcttttaatttttatcctggtgaacacaaagagtttaattttatcggtgaaaccaccggtggcattaacctatacggctttaaagaaacaaatagaactgtatataaatatgcaaaaaagtttgctaaaaattctaatatgacaactgaagagtggattaaatatcaccaatctaaaatgaatgaatacatttcaactcaaatttcactcctaaataacaaaaaggactcttaattaatttaaagagtccttttcctcaaaatatacattataagtctagttaatatgtccttgtacactttctaagataggtgtaaaaagacatgaaagtagtaacttatttcatagtttaaaatgctgaattatcaacggggggagttcatttagtacccattttcttgtccgcatattgagacaagagaatgggtacttttttaaacagagacaccaaagtggatactttttaaaaatagaaaaaacaggaaaatatttttttgatttataaataaaaatattaagatttaatgatttttgaataagaaatttttagtctctttaagatgaataaaatgataaatcatatctaaatcattaaaatggacactagaatcttttccttctttttctgcttctgttataagattattaatatatacttcatatttggaatctagcaattgactaggtactagcgagtctgaaattgaacttagttcttttttataactattaattatattagacaaatcgaaaactccttcctcgtaaagctaaatatagcatgatgtttccatagatatcttttaagaaatgagtagctaataaaattaaattttaatagggaaaatatgtaaccttaaaaagagaaagagtataattgattaataaataaatgtatataaaaaaacaattggaggtacatatgatggaatatagaaaaaatatggattggttaatacaaaccataaaaagggacctgatatttgaatatgaagacttatataaccctacgcgtaatgatgaatgtccttgcggatcagggttaaaatataagaagtgtcatatgaattcgcagataaagtggcgaaaagttgatggtatgtttcatgacggtaaaaccctatatgaaaatatagagttgaagaaagggttattaaataccatgctagatatagtattgtatttaaaagagaacattagaattagcgaagagaaaggtctagaattaataggtgatttatttaaatcacttgatgaagtatttaagcaactgcaaaaaaatgctccttgtagaaaaggatgtatagcctgctgttttcaaccaattaatttagcaacaattgaggaaagtaagataagaaataagcttacaaaagatatagagaaaaatattaataagaatcatcaagaaacgaaaaagagaagaaaaattcctatgtctcaaattaataaaaatagtagtagagcgaaatatgctgaaccatgccctatgctggatgtagaaaataaaaaatgcactgtatatgatgatagaccatttacatgtaggacgtattttgtggcaaattcaccagatttatgcaatatgtatgatggcaaggtaacgatttataaaaatcaaggataccaagagttggtggaaattgtaatttctttaatagatgaaacagtatttggttgttttgaactcaagacattacatgaaactttttataaaaaaaagacattctttaataaactgaaattaattttttaataaaaggaaaaaattaccattaaaatatcacatgacaattaatataatgtgcaatatcaagtagtattggaggtgattattacatgatgatggatctattatcaaatcagacagtattgtttagaattgcaattggaatcaaggaaaaaaattacataccagtaggtatttacatagatggatctgtgaaggaattaaaaatgagtgaccttactgaaaaattatatataattataacgaattattaaaatatattaatttaattattttttactaaaaagaaatgatagcatataaaaattcaaacaatataaaaagggaagagtgatttcttccctttaagttagtatttattttgtgtacattagttttcaaccaccatgatctccatgttccatcatcataataacaggtgtcacagattcattgttacccttgtcagaggaaatgcctgttgtcaaagttaaggccgttaaaacacccattaatcctaatactagttttttcattttaaggactccctttctttgattttttgtcgtgtcttcgaggctagatagaagtattcacttgatttaatgtggcttccttcttcatagaatttaatagccagatactcttggctttcttctatgtattcatatagtgattcgccttcaaagtaagatattccttcaagtgcagtcttttccaaatcctctccagagacattggagataagacattttaaaatagcaaataggtgtttatattcgctatttcctaattcaacacaaatactataccctttatcagctaaatcttttgcaatatcaagttcatctaacttgtaatgctctctagcttgcaggaataaagctttatggtgtctaggattataagtagtcacttctgataaatatctgattgctaatggagataagttctgactagaatacatatatcctaagttatgtctaaccattagggcatacttttcttcatcaagcttcttgaaaatatccatagctttaataagatgttcttctgataaagcccattctcttagctttgtacacgcagttccaagaaggttctcgcagaatccaacgtttcgttcgtaactttcatgtttctcaaaaatctcttttgcctttgcagtatatttaaccgagttaagtgcttcgtatatgtcataatggaaagcacctaatttgtagtaaaactcagctttttcaatctcatctgggactaattcgagaagagattcagccttgtcaaaatgctcttttgcaattgtgtagttaccaataccagaagcatgaatagctttaaagaaatggtagtaataagttaaaaagttgtttgttggaatctcaaacgcttcaaccttatcaaagctacttgcagagacacctaaattatctacaatgtattggaagcggaagtctagaagggaataatataatagtaggttttgatcttctgttatgttattaatcttcttatcaatctcttcctttaacctatgcgcttgaccaatccttcttgcacggatttctatataccattcatttaaaagttgtgtaatcttctcgttccccttaactgaaacgttcatagtatcctcctcatcccatctatatgttatatcttaataaatatcataacagaaattagataagactaaatccatcatataccatttctcaaataaatacagaaaattcagttaattaaagactcaataaaagtatagcataaaaaaataatacttacataatttaaatgttttatatgatttagcaaatttttagaccgcccactttcaggatttttactattttctaaaatagcaagtgtagtttaactcgcgagcttaaaactattcgttaaatagaaatttaacgagcagttgacaatagaaataccattaaaaactactataaaacaagggtaattattttgaagtcagtaactttatcattaacaccaactacttttgttgtaacaggagatacaaagggagaaatgcttgcgaatgcaaagaaagcattcgttgagcaagtatcaaaaaatcttttcccccacattaaatattctattaatgacgcagatgcattaactatggaaacaagtttccctgggttacttgtagaaacagaagaaggcttgaaaggaattgttacagcagttcatagaaagacaccatagatgtcattttagcgggccatctagacgcaaatggtgaaccacaggcgtttataaaatcaaacgcaactttgaagaggctagaagtattcgatgtgaatcttcgaagccaaattaggaagaaggcgacagtaggtatttgaaaaccgaagaagggttcaaacccgtagttgttggaaaaacaactacacaaaaaacaatactacatattattggagctaatgaatcagtaacactaacaccaatagaattaatgcttaatttaaaagataataatacaattatacaggttaggagcaaggagatatggggactaaacgacaaaatctcaaattattggagattctaagactatgacgattcagtataactatgttaaatctacagggtatggtcattcatgtccttttatgtacaaagacatgaaagtaggaactaattttatagtgtaaaatcctgaattatctatagaaaaagttcatttagtacccatttttctgtccgcatatcgagacaagagaatgggtacttttttaaacggagacaccaaagtggatactttgtaaaattggtgctaccccttaaatgtaatgaattttattcagggaataattacctttgatatcctaagctagtttatctatagtataaatgggtatattgatgacattagtatttttatactgcattaattcaaagtgataaaatttctttgtgtttttttaattactaaaaacatttaaaaaacttcacgacaaacacattttagctccactcatcgcacaagttaaaattatataattaatttatagtaaaacaaactaataattttaatataataatattaagaatatacatttattgattataataaaatataaattgaatgcgaggttgtattatgaacaaatttaataatgataatataccaggtttagtttctgaagaaaacgttgaactattaaaagttatggctcatccaatacgtctacaaattgttagtgaattggctaagagcaagaaattaaatgtaacacaattaactaatattttggatattccacaatcaacagtatcgcaacatttatccaaaatgaaagggaaagcactgaaagctgaaagaaaagggttagagatttactatcatattcaaaactccaaagctgataaaatcatacaaatactaggtcatgctaattaaattgaaaaaataggtggatgtacacccaaacagggattactattcacctattttttattttataaaaaacataaaaacgttatagtaaaatttctataattatagtccttgtttaacgtattaaagattttaaagcgtatgttatagaatgtaacgcatcgtaaaaactttacaacatattcataacaaccacggtaccctttctcgttaaaacaagaaaatagtaacgtgtttttacctcataaatagtctaaatccttaagttgatggatgtggggtggtaccccatgcccatcaacttaagaaatcaatcaccctccaaaaacgaaaaaatggactaaattcccatgagcacctatgaaaagataaaattatcgctttgggttcaattcataatgttagattgatggacatatatggtgacatcttttatctgttattctaaatacaattgtattagtaacatatgtatactctcagcaaaacttaatagatatatctaagcttattatcgatagcatgtactagctatatgatgaatagatttttaaggagggggaggatacatgtcaaataaaagtgaaaagtattcaaaatggttagattcatatgattttttatctgctggagcatttgatcctagccttgtaggacctaccttatcaccgattccaccatttacattaccaacaggtcctacgggagtaactggacctaccggggatactggtcctacgggagttactggtcctacgggagttactggacctaccggagataccggagcaactggacctaccggagcaactggacctaccggagatcctggacctaccggagatactggacctaccggagcaactggacctaccggagttactggacctaccggagatactggacctaccggagatactggacctaccggagatactggacctaccggagatactggacctaccggagcaactggacctacgggggatactggacctaccggggatactggacctaccggagttactggacctaccggggatactggacctaccggggatactggacctactggagttaccggagcaacaggagagactgaaggttgtctgtgtgattgctgtgttttaccaatgcagaatgttttacaacaacttattggagaaactgtgcttcttggcactattgcagacgcgccaaacgtcccccctcttttctttttatttactattacttccgtaagtgattttttagttacagttacagatggtaccacatcctttgtggtcaatatttctgatgtaacaggggtaggttttttaccgccaggaccatctataacattacttccacctgtagatttaggatgcgaatgtgattgtcgtgaacgaccaattagggaattactagatacgcttattggttctacagtgaatcttttagcaaatactggttctactgcagcagattttaatgtggaacaaacaggtcttggtatagtgctaggtactttacctataagtccaaatacaatcgttaggtttgctatttcaacttgcaaaattacagctgtgaatattctctaaaatttagatttcttaggagaatataagtttgagggagtgcacattccttacgtcctttaaagattaaagagccaatttacccttaacggggaaagtccggctcttttcttattcaaatttgcttagcgtatattttcgttaaaatgtaggcggtatgccagatttaaaagactgaattcagtctttttttgttttaggggtattaattttttcttagcttgatggacatgtggtggtacccccacaatagaaggatgcacttcagtaaaggggaaattctaagtaaaaaaattcttcgtcaaacacctatttttaaactttttattaaaagtcctttacataccatagaggggtatagtattgtgaaattatggaggtgaggaaatttcgatgatttcagaaaatcttaataaaattgttgaaatcgatcaatgctgctcataagacggtataagaaaaagccgccattcagataaagtaaagaataacttaacgattagttcagaagttaataagtcatatattgaaaggaatgaaaaattatgagtttggaagctttaaatgaacaagtaaaaagggatctttcttatcttgcatttgggggagaggattgggtatgcccaacccaccatcctgaggggcatgtctacgatacagttattataggaggcggccagtgtggcttaggtgtggcctttggacttttgcgtgaaagaatatctaatatccttatcatcgacgaaaacgttgaaggatatgaagggccatgggtaacttacgctcgtatgatgacattgcgtacgcctaaacatttgatatccattgatcttggagtgccttctctgacttttcgctcctggtgggaagcgcaatttggaccaaaaagttgggaggacatcgataagattccacggaacgattggatgaactatctacgttggtatcgaaaggttcttaatttacctgtttttaatgaggtaaagatgaagcttattgagcctgcaggggaagatgtttatcgactgcatattgaaggagcaggagcatcttctaatacattactggcccgcaaggttatcttagccactggtattcaaggtggaggggaatggcacgtaccatctatgatttccgaaacattacctcgtcacctctatgcacacacctcagaagacattgactttgaggcccttaaagacaagaaggtggcaattttaggcggtggggcctcagcttttgataatgccaattttgcattatctgaaggtgtgggttcagctcatgtgtttgttcgccgcacggagatgccacgcattaacccaatgcgacaaatgggggtgtcaggtctaattgaacgttttaatgttctatctgatgctgataaatattccgttatggcccattactttaagcatcaaccccctacaaatgacacatttgaacgtgcagtttcacatcccggctttaaattacacttaggtgcaccatggcttgaggtgcaccatggcttgaggtacagcatgaagctgagaaggctgttgtcactactccacaaggtaattttacttttgattttctaatcatttccactggtcttgtgactgatcattctttacgtccagagctaaagcttttcgaacgccatattgcacgttgggacgactattataatgcacctgctgatatcgccaaccgtaagcttgatgcatatccttaccttggccctggctttactttcacatgccgggacaaaaaggatacaaagcttcttcatggactttttgcttttaactattcagctgtagttagctgtggtatctcagcctcttcgcttccgggaatgagatatgggatacctagactagtttcagctgtggcagaccagctgttctctgataatcgtgaggagattctgaaaaacttctattcttataatgaggctgaatttgttggagaatggacaaataggggttctgaggtaagataattttttcgatatggataaggataaataaaagggtgcagatatcttcccttaacataggctagaatctattggtggaggagcgttcaagcctaattcgaaatatagacttagtttactattcaactattgaagggaggatatacaattggggaaagtctttacaaaatcgacgtgtgcattactattgttaatctttctttggggtggaagttggccaatctataaaatggctgtgccttatacgcccccgttattatttgcaggtatgcgtgcagtgattgggggccttatactagcagctttcatatataaaatgcggaacaggatcaaatggcgtgaaaattggtcgaaatattgtatttcagcattctttaatacgattctcttttttgggttacagacagtagggctcatttatttgccaggaggactgttttcagtgcttgtctattttcagccagtgctacttggattgtttgcttggatttggcttggagagtacatgtcgccgtttaaaattatgggtttgattatcggatttcttggaattgtagttgtcagtgtggacggattaaccgttcatgtatcgatcattggtgttgttttagggttgcttatggcatttagctgggcacttggtgtggtttatgtgaagaaagtgagcaacgaagtagatgctttctggatggtgtctttgcagtgtattattggtggagctattctaataggtactggaacaatttttgaaaactggtcagctattgaatggaatggtaaatacctttttggactcggatatggctccacttttggcattccactggcatatatcatttactataaacttattaatgcgggagaggcaagcaaagtcggtacattcacgtttcttgtaccgatcattgcagtattcattggtacggtgtttttagatgaaccggtaacttaccgccttgtcgtagggctgttattagtaggtgtaagtatttatttcgtgaattatcgcgaaataaggtgaatgcttcattattcaatagagcgcaggcaaaatttaatacggaagagtaaaagcgtaagttctagaataaccagaaatagtttagaacttggcacaccatcaggagggaatatgaatcgccgactccatagcaaaatcaaacccatgtattttgattaatttttgttcaaaacgcgtgggttttttctattataaaatcaatgttcacagcataattttgatcgaaccttattccaaaccaacaatacagccggtcccttaacgtacaggaaatcggctttttctttgtcgaaattgcttagcgtacgaaattcgcgttttgttggtgagaccccatcgctatcaagctaagcttatgcaaagtcaattttagacgagattgtttcttttttctaaagggcaagtgtaggtgattgaaagatttgcatacgaaataaaccctaacgggtttcacttttttgaattaagcggcttgattatcagacatggtacaattgtaaacgatacctaatatatcaaagaccgtttttttctcatatcgatgagatttccgcccgttttgctgtaggagattgaacaggcgaagtaacacctttgatagctcttgggtgtttttttgtatagtttggaatagaagaagaaagtaatctttaatcatatatatggctttatactcactaagctctcgttttttctttatgaggagcaattggcacatttgaaacatgatagaagaacagagtagaatggcaatcaattgaccatataaatggcactccaatcgttctgattttatctttttacaatgatgaatttgaaagaatgacttccacgttttaaataagatttgtcgggtaaaagactggcgcggtatcagttgtgatccgtttccagcctctccccataagaactgctcgtgaggttttccctcaagcagctcaccccataaacttcatcaaaagggttatgagacctatcaaatggctttttatagaaaaaatccttagcgtggtttttttccgaaatgctggcggtacccctttcttaaacttctgttcccaacatacaaataggcttttgtctcataaggctcatgtttaaaatacgagtaactacccttaaaaatcgttagttggcgcttctcagtctgcaacaacacccaatacttactttcatccaacacaacacctgatacattcttaccactaggaaaataaaccgtaatagtatcctctacagaaaatacatactccgtaggctttttataatcagctagtttcatttccttcgtatagaaatcatttgtcataagtaatggatcatgcttcacatgtgtaacataagataaagcacccttcatgattgtatagtaattctctttttcagttttaacataaagataataggcatcttcagacaataaagtccctttgatccccttaccatctttaaatacacaacctatcagttcaccaatctcaaatacaaaggatgttttcttcttcccctcgctaaacttaggagatctttcttcaacagttggaaactcttcatgccttatatatttaacttcagagaaattaactgttacttgatacagagcaccgttcccctccacatcaagaacacaataatactcttctattgttgaaattttaccttttaacaaatcatcatgatttagtagctttatatctacagtagcccccctcataaatacaaaagagtgtctgtaacgccctctactatcacgatctataggataatttttacccaaagtaagcaccaccaatattataattttctagtaaacctctataaatttcacataccataatgagtagttaaccctagtagtataagactaatctccaagaataaaagaaacataaactatgtaaggccataacgctatagctagctgaccgaaccgtgtatcgtagatataattatgtattggcagagtggacaattaaaaattaaccggctggtagcccttctaatatgccgtatagtgtttcttcttccgccatagcgttacttgtttttgcttgtccaagaacattacccatttgagggaatagcccttgtaaatagtttaaatagctctctcttctttttccgttttcctttaaagcaaatgcaattagcattccttgtgtagatagtcctgtttttgctgttttgccttttccctcaaccgttttatagatttttgtactcctttttagaaccgtgtttaatgtactacgtggaatgttaagcgcttcgcacagttctgattgtgtaaagtatagcacaggtttattatttgaattcatcgataagaaagtaataatgtcagcttcccactcgtgccaatgactacgcacacgatccttacgttgtttcttatgtttcttccaaagtacagaaggcgcacggaaagctgaagcctgtccacccaccccatatgtttgtaataaacgctctatgtaatctttatgtgctgcctgatactttccagagtacgcagacataacaattcctctaacttcagtatgatctagcggttgctctaggttactattaaactgatccattaagtccattgtgtctttaataacgtactgactttggaaacacgctaaagaaagggtgaaaatcgcattgtttcgccctgctttcgtttgttttggagatacatttgtacaactaatcacctgtttgaaccatagttcatccatttgttttggttgctctacaggagcgtttttagcaaaaggactctctatcacattatgaaactgttcatttcccttgttgtcgtcttgtcgcttgctccactcttgtaactccttgaatgtatacacattttcctcaaagaacatcacaacattttgtactgaaggcattctgaagaacccaaagtgattgcatgttaaatccacgtttgacaaactctcagcaaacatttctcgtaggttttgagagatacgtttcgctgatttaatagctataaagttcttgttatttgatacgtacacagctttatccaacacataatacacttgatagccctttgttgtttcaagaatcatagtaggtacaccaaaacctgcatttaatgccacatcattaatcgcagtcatagggaatgactttgaatcaatatcaataacaaaacagttaatttgttgtaggttcttttcagtatgccccacaattgtacgaagaccattttcaccatatgtaccaaaattatatacattaggtgtccagtgtgaagcctgtccaacatgatccagtacagcttcttcagatgataatactacgcccctagttccaaacttggcgcttaaatcttctttcttacgagtaataaaaactgaaccttttttattcttcttgccatttaacactttgctttcaaatttctcttgtgttgcaatagatactaatccagctttcgaatttttagatttatattttcgtaaccctttatgtagtattaattcgatagcgctttgtactgtattcatgttgaacctcctttccactgattttttacaacaaaaaaggtgagcagttatatcactgctcaccttaataaatagacttcccaagattgcatacaaaggcagaaaaatccatacttaaacatgcttaaaaatgcacttaaagaagggtttctatctttacaaatctactctaattaactatactaagaagagatattttatatctcaatagcatagttaattagaacggtttgggaagtttactcactggtagtcgcagtgacgtaaatggaatacaagatgttgtcagcaaattgtattcaccaagaagtagaaatgttgtcagcaaatctacttcccctgtctggtttgagacctcagaaatctcgaactaaacagccgttctttttttatttgtttttttctgttttatgtgtcttatatattctacaaattcttacgaatttcttatgtatattatcaaactaaatcgtattgtgttgagaaacttgttgtctattacgttacaacaagtttttttatttgtaaatatcgaaaaaagatacatattaaatatacacccctaaaagaagaaaagatacatgtatctttgtatctttgtatccttgtatctttgtatccttgtatctttgtatccttgtatctttgtatcctcttaatcttgtattcttgaatgacttataaaatgttgatttaacagcatttattatagaattatcttttggtttcccataaaaaaatagtaaaatataaaaaaggatacatttatccttttcatgttattgctcatatgttatgattgatttaggatacaaagatacatgtatcttttgttacaattgtgttacatttaaaaaggagtgaatctctatgaaaaaaggacacgtaataattaacgcccaacaaaaagggggcgtaggaaaaactactgactcttgtatggaatctcttgtagcttctctagtatttaataagaaagttttattcattgatacagaccttcagggaaacgggactacattcttagcaaaatcctttaaaatagaagaaatgcaaaaaacattaatgaaatgtttagaagatggtaatctatcagatggtattataaaacttcatgaaaaccttgatatgattccatgcggttacgatatgagaaagtacacagattttttaattgaaaactttaagactactaaagatagaactttttattttgcaaagttgctagataaaattaaatacgactatgactacatattcattgatattccaccttccactgacctgaaagtggataatgctatggtagcaagcgactttgttatagtagtgcaagagacgcaacaattttcttatgagggaagtcaaaggttaatctttgattatctacaaaccttagttgatgactttggacaccttgtaaaaatgaacgtagttggaattttacctgtattattgcagaagaagcgttcattgcacaacgagattgttaaaaataccattgatacttttggtgaagaaaatgtcttcagtacaataataaataatcatgctcgcctagaatggtatccacgtattggtttccaattcgaagatcaccacgataagagaatgttagctctattctgcgacattttctgcgaacttgaagaaagaattcatctatttgaaactaaaggtgatattgtagattataaatatactcctaaatatttcgtagataacaaacttactaagttagggaaaggaattgatataggtgagtttactaaagagagagcaacccaaagatcctaagattactgaagctgcggatgtgacaagagaagtagaagaacatacaccctcttctcaaacaatagcggaggcaacaaaccaacaaaaaaaacaagtcggttcgcaaaatcgtaaaaatataaaagtttctcctgatacatttagcctgattgaaaatatctgtactttaagaagcttaaaaaaatatgaagtaatagatgaactactcgcaaactttataaaaaacgaattgactgaaagagaacagaagctacttcaaactcttagttctaaagaggatatatagagatacgcattatgccgtatctttttattttaggatacatgtatctttgtatctttgtatctttgtatctttgtatctttgtatctttgtatcctaaaaatttaaattacaaaggaggtttctcatgagaacccttactattattgccttagttgtcatatgcttagtattttttaacgtaatttctatacatacaatcgggacattagctgccataatcggagtcataatagcaattatacttggtgcttatttcttatatcggtttgctcttggatttcttgctctatttacaactttcataggtgttattttagtgatctgcttaattacatatgctgcaactcatttaatttaaaaggagaagtgaatcatgaatgcactaaaagaaaataaaaaacaagtttctttctttgaaacatttttcaaaaatcacccaatcaagaatgatgtatttgttatagaagcaaatgaaaaatacttcttttttgaatacgacactgtcattagtatgattaataactttagtcaaaaagaacaagattatataagaaggcaactgcaactgtacaattacctaagacaagatttatcaatttgtttaatgcaaattgcaactgattatgttagaagacttataggagaacataaaaaaacagagtgcagaatcctacctctacactccatttataatcacagctaaagaatatgaaacttctttaatgcaatataccttactagaattatactatatccctacagtacttgtaactaaaatggagtccttaatcggaatccatttttttctattaaacctttttattctatgagtttattaaaaaagaaacatggagtcctacttaaaactctaatttttcacctgttttcaaattatctatataacccaaacgtaaactatgaaacttatctaaactttccatagcccctgcaaattctagaatacacggaatttccttctttgattgaaaagaaattactttcgcctgtggtattttatgatcggtttgtaacttcttcaccccaacacctaattcttgatataaaattctattgatattactaagtacatcttctgatccatgtatacgcaatctaggtcttatataactccgattcttccttttctccgttagtaccattaaatcatgcgataattttatgtatgtggaaacaaatactttttcattaaattcaccttgtggaaaaattcgattcttctcttgaatggaagtccagcccatctctagaatcatcttatagaaaggatgtctaaggttaattagtgtgtgccaaaaatctattttatcttcctttttcctagaaaaatgactgactgaattacttccaacaatcaattcacaaaaacgaatgggtacatcctttcttttatttcttatagaaaagtaagttgctcttttgcatccatacctccaagaaattgctaaagcttcagcaaattgatctgattttataaactcctgaaattctagttcttcttcttctgttaatctaaatctcctatccataattctattaccatccctaacttcatctactacatacacaaactggaatattcatttcagtcctctatcaaaaagagtttttatcagccttttttagagcagattttatttattatccaactcaacccacttataattaaattctccaccaaaatcattcgtgacaatgccttttacagaagaacgttgtaagtatgatctacctagttggtagaaaggtgcgaccgctccatcttctattaatattttttcagcctgcttcatcgcttcccaacgagctttctcattaccagctaaattcgttttcacttcatgaattagatcatcatattgtttatttgagtacttatcaaagttataggtactgtccgtcgtaaataaatctaaaaatgtaattggatcaggaatatcaggagaccatacatcaacccctaattcgtaatcactatttagaagtaattgaatttgttgtttacgtggctgcggcttaacgttgaccgttaacccttctaaattcttttctaactcaccttttaaatactccgcattcttcttggctaaatcattatcacttgttaataattctaatgttacttgctctttcccaagttcttgctttgccttcttccagttctcctctgctgccttcacatcgtcttttactaacgttccattttcttttcggaagtcttgcccgtctgttcctttagcgaaattaactggtataaaaccatccgcagggagtgaaccattgtttaacactgtatctacaaaggctttcttattcattgcctgacttatagccaagcgagcatttttattttttaatacttcgttcttttgattcatacgtaaaaactggacagtaacttcagagcgttccttgaagtcaggattctttctatatttatctacaaattcacctgttagtcctacacggtcaatttgacctgattcatataaatttatttctgttgatttatcttttacaatatcaaagttgatttcgtctaacttaactgttttagcatcccaataattcggattcttctttaactgaaaaccttgttcatgcttccaattatctaacgtaaatgctccattataaactaattgatctgcttctaaaccatactgcttcccttttgattcaaaatacttctcattaatcggtaagaacgttgcgaacgttgtcaaatctataaagtagggaacaggctgttctaattgtatttctaatgttttatcatctattgcttttacccctagctgatctataggtaactctttactattaattttctttgcattctttatatcaaagaataaaaacgcatattctgccgctgtatcagggttcacagctcttttccaagaaaacacgaagtcttcagctgttacaggtgttccatttgaccattttgaatccctcaaatggaatgtgtatgtttttttatcttcactcacatcgtacgattttgctactgctggtattgccgtatttccttcccctaatgtatataaaccttcaaatacgtttttcattacattcatagaatcaccgtcagttgccttgctgacatccatcgttgggatttccgccatatacggtaaatgaatggattgtgtttttgaatctttatcatttgcatttgctgtattttctttcttttcactactacacgctgtgagtaaaaagctagctcctaaaacagcagccataataggcattactttttttaacatgtttattttctccctctctacgtacggttcatagcattagattatctagttgtatatcgcctagaagaagcaaactttgcccccaagtaataaacctcgtaaatctttcgccagtataaaacgtagcacccaaagatgggcatgtcaattggacaaattataaattttaatatttaaatcataaattataaagatatttactataaattgttgtgtaatgatatctttaagccctcttctgaaaaacggatctttattttcgtttttaacggtacatacaactgaaattaatacaattacactaaagttactaaaaatcacacatacggattcatagaacccttaaacgaaatcctgtgaaaatcatttcaaattctaacttccatcctctttttaggtcttggattacatatatctatctttacggtatgtgaaattatttatctaacgaaaaataacacaataatagtcccactataagaactattattgcgttattaaaatatttaattacaattcaatgattcaaattgtgatagaaagcatatttaaaaaggaatcccaacttaatatatattcttcattatcaaattatcactcttataaatttagaatacctatacattttttacaaatattgttatactaaaaggaatcaaatcattaccccattaacaaggggactccataattggagtccccttgttaattagcaatcaaaaatgatcagcatgtgagtattgtataatctcttccttttttaaagcatgttgtgtatcacctgtattgttactaaatgataatgctataactaatcctaatatcgctaacacaagcttcttcattattttaacgcccctttgcttagtaatttttgtttcgcttcgtaacatgcatcgaaataatcactaactttttcatgctcattcaatttgcggaagcgaaccgctaatacttctgcatattcctctacaaaatcccataaaccctgtttttcgaagtacggaatacttttattcacttcttcttctaatagtttaattgcttcatcttcattaagagaacgtaaaatattgaaatgatatacatactcttcatttcctaattccatacaaactgctaatcctttttcaataagttcttgtgcaacatttgtttctcttagcttatagtgttcacgtgcttgtaagaataatgctttaaagtgtgtaggaatcttctctgttacttctgataaatgacgaatcgctaatgtagataagttttgagttgcatataataatcctagattatgtcttactactaaaatcaatttttcttcattatgtttttgcaacaggtcaatagaacgattcagatgttcttccgctttttcaaattgttttaagaatatacaagctgtccctagtgtgttttcgcaagaagcaactttcacctcatatccagcatgcttttcaaaaatttctttcgctttatttgcgtattcaatagatattagcatactagacatatgatgatttaacaccgcatatttttgattaaactctgcatgctctaattcatcggaaatatgctctaataagctttcagcttcttcatattgtcttcttgcttcattgtaattactaaacatcaaagcatgttctgctttaaaagaatgataataataagctatgagtttatctgtcgttttattgattgtatcaattgcttcaaaactatcttttcgaatacttactcgatcagttagcattctgtatttaaagtctagtaaagaataatataataataagttttgattttgtttttctttttcttctgtatgtttaatctgttctattttttcatctatttcttttttcacttcagctgcttttataatttgctgcgacaacatcatttgataaaaatcattaagttgttgcataactgcttcatgcgtgaaaagatttgtgctcatatcactacgtcctcctcaaccactttcatttacctaaatattaacataattctgcaaattacataagagtttgacttgtaattataagtttctaaaaaaaattcagaattttaaaatcacaattacacttcagtataagtgctcatttccaaaacatccaccaagatttcttttttactgccgctatttcttcccgggctaatacaatagtacgttttgcatcttgaatctctcttaccatcttcataaggttatcatctcttatctctaaccttttttctatcctttcttcacgttccttccgatctttcatatcttctcttaataatttatttcttcctttaatatcctctgcaattaacttattcctttgatctatacgattccctagtctattttccatttctaaaaggttagcttgctgcaccttattgatttcttttatcatagcgctatattgttgttgaaattgatactgcatttgataaggaactggatctgcaccttgggactcctctttcttattatcgattccaaactgcttcgcaatcattttcgcagccttctctaaagtcatgccctcttgcttactcaactctactaactgttcaataactacaacatcaaactcagtatattcccttcttcctctactattctttcttacatcatatccttctcgttcaagaacatccgaatactttctaagagtgctgctacttacttctaaccgactatagacctcattgctggtatatactatctccgcttctgacatagcgctatgccacctcctataatgaaaattccatattaaaggaataatcccttttagaatccatcgacgaagctcgcacggtctttgctatgttttgtcggaataaagggacttgaaaacaaataaaaaatctttaaatttccacttaaaatatatggtcgggataagtataatgcctaacatgcagaaaaaaaggaggaaatattacgaaaaagaaaaaggcacataaaagaacgagcaaattaaacttaaatgaagaagaaataataattacatattatgaagatggttatttactctctagttatatgactattttcgatattgacccatcaaatagcgctgtcatatgtacggatgctttttataacaagataaaactgcaattttctaatataataggtgtaaaatagaacaaattaacgttatcaagttagattcatttaagggagtgtaaaaatgcaagggaatcaattaaagaagaacacagcaggagtagttattcataatgatattaaaaaatacccctttctaaatatacctatgattattaatgaggaagacggaatggtttatgaggtattaaacgctggtttttacactaatgatgcagtagcaatgataacaacggatgattttactacaaccagggtaaatgcaccgattataacagtaaaaaacaatgatggtagtattcaagcatatcgtttacctttagaactagaacattgggtactttcttgtatgcgtgctgcttcagtagaaaaaaatccgtttccatgtaaagttgcttttggaatcatcgacactaaattttatgtggaattcaagtgaaataagaacacgattgggttgaatcaattaaaataataaaactataaaaaagagaagggtacttggtattatcccctataggtagacagtaaaaaaagagtccatctgatatgatggactcaatactgttttatctggaggggattttgtacatgcttaaacaagcgaaaatgtacatgtttatcttgacatttacactaatttccaaaacttccaccaggacttctttttagctgccctcccaccactatgagaggtaaatgaaggaaaccgatacagcttgtgcgtatgcagtgcattttggtctgggtcacagtcttttaacgtggtcgaactacagggggagtaagcatattcccgatggatccatttctatacctccattatctagggaaatcccccagtatccaagactaaattttacccatacatcattttttgatgtagctcttgaagataaaaactatttaattttcaaggaacagttattaacttaaaacttattatatgaggagggtgtatcatgaaaaaaatatgctttgtattaattgtcgacgctggtataaattatggttcaatattttctctaccatttttaaggaatcaggatgatttgaaggaatatttctctaagtattatgatgtctcaattaattatattagggataaaaactcagttgactatttggtagttcccaaaccgtgtccagcttttgataatgaaaataatcttccaataattgaagtaccagcaatcttatttatggaaaagaattttgaaaaaataaagacttatatagataattatttttccaataactcataaagaaaataaaagtacaataaaaagaagtccgataaaaaacgaatatttctattaatcattcgttttttattatatttacatatattttttaaaagaggattatagacgttctgaaaaaaattaattataacaagaacagtgttcgtgctactatctacggttattttttgtactaagtacccctttaactaacaagacaacaaaaaataattaatatattaaagtgaataatgttactatttttcaaacctaatctagaagacaccggaattctttcggcttcatattccttcatcagctcaaaatcagcctgattattaacatctaactttcgtaaatcttactttttatctatttgacgtatcatatttgaaaccttcaagctgaagctactttcttgcaccttttcaaaaccaaatttaggataaaattctaacaccgtatcattcgcgaataagtatataaaattataattcttctcgtattttttaatgatatgattcattaatttagtcgctaattaattgatattcattcatgataaatcctccattttttattatattttcctaaaaagagtgtatatttcttacaacaatctactactaagttttcgttaatcaccgccttataataggtgtaacggcataaaaacatgcttccggaatcaaaaaacgacaaaaaaaagaccacaagaagaaacatcttctcatggtcaaatttctgtctattataaatacacctatcccgaaagaatagatatcgtgaaataacatgaaattttttgataagatataatgtcttctaaccgctactagtaaaagggtataacaaataaaatcaaggaattgtccttaatttgaccttttacagtataaaattcgtttgaattttaattagcgattaataagcttcatcatatacaatcaaaacctcttttcaatataatttcttactaagaatatctcctttgaaaaccgttgtaaatgaagacataacaaaaaacaagatttatgtccttctgtatcaccaaaatcggtcgtttttggtgatacaaaaagacacatactattattctcgaaaactacagaaaaatccctccgtcttaagacagagggactttctcattcctatttcaaactacctgcaatctccgtaaagataactccaagcgcatgtgcacctgcatcagggtatcctaaacttctttcgccaactgtaccagcgcggcccatgcgagctacgatttctttcgtgtactctgctcctttaaccgctgcttctgcacctttttcaaaggcagtttttacgtctacttcgtttgaggcgctatctaaccaagagtctacacatggagcaagtgcgtcaacaagcgttttgtcaccaactactgctcctctgccgaatgatctctcaccgatcgattggatgccttgcagtgctgcttgcagtatttcagcgaattctttcactgttaactcacgcttctcgcctgctgctttactagctgcgcggaatgcaccgccccaaattggaccagaagcgccgccgcaatgttccataataatcatggagcaaccatcaaggaatgatccgattgttacgttctcttgatctacaatagaatgccactcacgttttaattgcttaaatccttttgctacactcattccgaaatcgccgtcaccagcgtgcgtgtctaactcacagaatggtacttcatttttaatgataatatcgctcattttatcaacgagataaatcatgttgtttaatgtaatgacattatctttaataacagcgtgttcttctgctgtttctagttcaaatgaaacttccttctcttctgtttcttcaagtacatttacatactctaaactttcaactggtccatctactttaaacgctggtgtattacattcttttgatagtaatgtttttaactcatcatctaatttcattacagttaaagacataccagccatatcgatactcgtcatatagttgccgacgaatactctattaattttaatgtttctagcagctaattctcgcgtcactgcattgttaaataagtaaagttcctgcagtggtgttccgccaaaaccgttaactagaagtgcgatttcctcgccatcttttactcctaaatcttttataaggtcatttgtcatacggttcgctagttcatctgctgacaacattttttcacgcttaattcctggctcgccgtgaatacctacgccgtattccatttcatcttccgcaagtgtgaaagtaggtgatccgctcgctggaactgtacaagacgttaacgctaaaccaattgtgcgcacgttaaccgctgctttttctgcgacagttttcaccgctcctaaatccatacctgcttccgctgctgcaccggcaattttatgaactaaaataactcctgcaacgccgcggcgtcctactgtatacagactatcttctaccgcaatatcatcgtccactttgacgtagtcgacttcaattccatcttccgtcgctaaatgcgcaccgtttttgaaattcataatatcgccgctataatttttaataattaataacgtaccttttttactagctgtttctttaattgcttgatatacctgaatttgtgaaggagaagcaaaaacatctccgcacaccgccgcatctaacattccttttccgactaatcctgcatgtgccggctcatggccactaccgccgccactaattaacgttactttgttttcgttcatttctttcttcttaatcactttatattttttcaaaagttcaagctctgggtgagccataaccattccgttacacatttccattactaatgtttctggtttgtttataatctttttcattgtgattatccctcaattcctttaatatattgtgatatatttgaaatcttcttcttactactcatgttaaaatgaaagcgttttatagtaaacggacaaaatggacaatctgtctaaagacaccgctctcatttatagataggatttttatattactaacattctagggatgattcagatgacctcttctataatttctaaaaagataatcgcgaactcattgaaatatttaatggaaacagagtcgtttcataaaatatcagtgagcgatattatgttacactgtcaaatgcgtagacaaactttttattatcattttaaagataaatttgaactattaagctggatttatagagaagaaacgaaagaaaatattatagactttctcgattatgaaaaatgggaaaacatttttgatttattatttgattacttttatgaaaatcaaaaattttaccgaaatgcttttaaagttattgagcaaaactcgtttaatcactatttatttgagcatacgaaaaacttatatatgaagattattgatgaactatctgtaagctgtggattcagcctttctgatgagacaaaaaatacgattgcctccttttatagtcacggcttcgttggaacaataaaagattggattgaaagcaagtgcgaagtagatccttccattatgtcttctcttatgaaaaatatgataaacaatcaattactactattacttgagcaatcagcaaagtaattaaagggtggcaaaagcaatgaaaaagattatgaatgatgtacaacatatcgttcaagatatgctgcatggcttttattttgaacataacgacaaagtaaattacgacgaaacaaataacatcatttatgtaaaggatatcgaaaaactaaagcaaaacgtcgcgattataagcggcggtggtagcggacatgaacccgctgatattggctatgtaggaaaaggtatgcttacagcggcagtaaacggcagcattttcactccgcctacagtggaacaaattgtagcggctactcgcctcatgccaaaagataaaagtattttattcatcattaaaaactttaaagatgacgttgagaactttctagcggctgagcagatcgctaaagaagaaggaagaaaaattgaccatatcatcgtaaatgacgacgtttcaattgaagatgatgcttcttttaataaaagaagacgcggcgttgctggtactgttttcattcaaaaaatacttggtgcgtctgctcttgaaggtcattctttagaagagctaacaacaattggccgttctgttacagaaaacttacacacattaggagttgctctttcacctgcaaacgatccagtgcaaggaaaagcttcattcacattaaatgacgatgaagtgttttacggcgtcggcattcacggagaaaaaggatatcgtaaagaagcactatcctcttctgaaatattagcaatcgaactaatgaacaaacttaaaagcatttatcgctggagaaaaggagacaactttgccatccttattaacggactcggcgcaacgccattaatggagcaatacattttcgcaaatgacattcgccgtttatgtgagctggaaggattacagattacattcgtaaaagttggtacattgctaacttctttagatatgaaaggtgtttcgctcagtttgcttaaggtagaagatttggattgggtgaagtggttgaaggaaagtacggaaactgctagttggtaatacaaataaagtgaaactttaatcagccctcaccaatcgggcttttacgggcagaccgatcctcaccttgaaataaacttttagataactcaaaataacaagcaaaaagtcccttcaaagttaaagggactttttagtatgtagaaattagcctaaacctaagattacatctcttgaaagggggcatttttatgttattcaggtttattgaggagcttttgtttgaagcaactttaaccccataccaataaaaatcagtcctgttatcttatttagaatcattcctaccttttggtttcctcttaatttttttgtaacatatgaagagaaataagcaacaaataaacaccataatagtccagttactgtaaaagtaagtcctaaaatgataaaaggcataggacctgaagcctttgtatctataaattgcggaagaaacgcaataaagaataaagagacttttggattcgtaagacttgttaaaagcccttgtatatatatttttctaatgttcaatttattggacgagacctggaaagctacattcgtcttatcaagtatcattttaatccctaaatatacaagatagataacacctataaccttaatagtgttaaatagcacaatggattttgtaagtataatagataaaccaaaagcaaccaacaacgtatgaactaaagaaccagtaataataccaaacacagaatacatacctgcttttctaccttgtgaaatacttctccccacaatgtacatggtgtctgcaccaggaattaaattcaataaaattcctgttagtaaaaacacttcataattaataataccgtacattttagcacctctatctatttttttggtgcccttattgatattaaattaaataaacgaaaaaagaaagtattttctatttattcaataaaattagcggatttttgaatctacaaacgaaatccagctatttaaaaattcaattactgaagaattctgccctcaatattacagcaaatttacattaaaaatgtaaatcctcatttcctttgtattttcctttattaagtctttttcttatgaataattctgcaacaattaaattgggtacccacgctaaccaagcaataatagcgtaactaagttcaaaacgctctattccaaatagaacgataaacaacggtagccaaattcttaatgtaactgctccaaaggttaaagaataatttctaatcatccaattccgatgctctttaatttttttattcttaactccatgtaacgcttgatatgctgatgttagccaaaatacagataacaaaccgaaacctagcttcgctaccaatcctcccgtagcataaaaagataggtatagtccagaaacgcctcctaataatataccaaccatatagattctcccaattattcgatgacggttgatattcctttctctaaatctagtggataatgtaaaaggaccaattactaatgctactatactagttgtaatatgtataaatagcatcatataccagaacgcacttaatttagatccaaacataagcttcacttttacaagccctgtttgaaatccatccataataaaatattggacaacaatataactagctactaaaaatgcaaaacaagtaactacaaaccaaattttcctgttcaaattttactgcctccttattacattcacgaaaattagattatatatttcttttcattctcgggaaaaatagaaaagccttctttactctctttagcacattgtttttataaaccgaatgacttacatgcaacgacgaataaaatatatgatacaaggcccttcttcatacataaaaaccctcaagtatgtcgttctatacttgagggttttttcatttattctctctcgtctctcattttcttaaatcaataattagctcatctgtaatctgctcaagatggaaaaatctttttatataatggatatcagaccatttttcttctccaccaataataaataattcttgcgcatcatacataaatgaaaagcttggatagaaactgtccgcttttatttcaatcccaccagtacgattactgataatcttacagtctgctgaatagcttaatagcgtatagagagaatcttgtgctgattggaagaaatacttcataagtgtggttatatcatcactattggtaatgcacactttaaaaaagttcgtatcctttttcttattagtaaaaactagctcaaaatgaagtttattctcttctaaaaacccttcaataaagtctctacataaataagtttcaaataacatatacataggaaatttgttatgtgcgcctataaatcctttaataatttcttcaaatcctgtatgctgattcaaattcgttcccactcctatcataatagggtgatttaaataaataggatacggtgattgcccttcatcttttaacatatacactcgtttttcatctgtatgaagagctggtttagactcttttagtaagtattgagataattgaacatttaacacatttacacctgcctatcatgtcatacataaactgtatctattaagttagaaaaaaggatgaacaattcatattttaccgtgtataagcgagaagaactagaatagatcgccggcttacatgtctccaggataataaatgaacatcgcacctacaaatgaaaaaactaaacaaaaaacagcctcgtattttataactaaagaagagttcgtatcaagccttttttcctctcttttacatatcattttaaacattttaaataaaactctatatattacataccccacaattgccccaagggtattcgtaaatacatcatcaatatctgtaattctattatttaataattggtttaactcaattgccaatgaaaaaaagaatcccgcacatacggtgtttttcatttttctaaactgcgaccaaatagtcggtaataaaaaacctaatggcataaacagtacaatgttcaaaagatacgtcgtactacctgccgtatcaaatagagtcaagttgatttgacttacacgaatccacgtttcatatctacttatatcccatacagtcgcgatctgcgtcaccctatacactagcgaaaggtagaatagaaaaacatatacccacaaaaaatgcagaatagatatagttcttttcgctttaaaataaaatccaatttgaaacacaatacaaaacataatagtaaaaaaataagtatacaaataactcatcaaaactcctgtatccatgtagaatcccctaactttacaatttcatctatgactttgttgtttataggataggagaaacttttaaaataaaaagtggggtaaacataaaatttttcttaaatcttcagttgggttttattattactcttcttaggaatccaccattgatagctaggcaacagtatgcttacacttaacaatattatcatttttgcacgtaatcctcgtaatactttaaccgatgaagcatatataaaatcatgtgaatcgtttgttcagttaaaacatgaaattaagaaatatatgacgtactataatcactcttgctatcaatagaatgtacagaagatgactcctgtttgcatacagaaatcatcttttttaggttaccgattttttttataatgtcctttacaaagggtacaaatcaagagcatcttattcctattcaaggggatcaactataccttcctcccttaaaatcactaaaacccatttacgaatctataaaagtagatataatatccttatggaacctttattaatttataaagcattgtcaaatgaaacaagatgtcaaattttatcatggttaaaaaatccagaaaaccatttcgacgaaaaaccttacctagaacaagaccttaactttcaagttggagtatgtgtaggagatatccagcttaaaactggcttagctcaatcggttatttctagttatttattaactatgaaaaaagcaggcttactagagtctgaccgaattggaaaatggacctactatcgtcgaaatgaaaaaacaatacgagagttttctgaatacgtccaaaacgaattataaaatgaaagctaataatcaatcagcatactaattgattattagctttcacacattctgcttttttacaggtatccaatgacttcttataaattgcactgcctgtaaaagcaagaaacatcgaaaggagaattttttttaatatatcatatctagttatttagatatctgttattgtatttcagattacatactcctgataatattggcatccaatcatgcttataataatgcttctttgttaatgaatttactttcaaaatactgatacgaatggagagttttataaatgaaaaaagtaaatcctttacttattctgacactcgcaataggtgtgttcggaattattactaccgagatgggtattgtcggcgtattaccacaaatcactgaaaagttcggaatttcaactacacaagctggatttttagtaagtatatttgcactagttgttgctatttctggtccgtttttaattctgctcgtctctagtattaatcgcaaaataattttattaacagcaattttcacatttgttatttcaaatttaatctacgcttatacaacacaatttgaagtcatgcttgtttttcgtattttaccggcagcgcttcatccactcttcttttcaatcgctcttgtaacagctgctaaacttgtccctccagaaaagagcggtcaagcagttacaaaagttttcatgggaattactgttggtttcgctttaggtataccactaacctcttaccttgcagaccaattttcactcgaaatggctttcttattcggagcattcgttaacactcttgcattcattggaatactactcctacttccttctatgcctgttaaagaaaaaatgtctttcggcaaacaaattcgtatactcggcaaaccaggattatggttaaatattttaaccgtcacattcctttttgcagccatgttttccgtatacagctacttcgccgagtaccttgcaaaagtaacttccatgaatggatctctcatcagtatcatgctattcatatttggtatagttatgattttaggtaatcatttatttggtggtctcctgcaaaaaagcataataaacactgtaatatcattccctattctatattctattgtttacatattggtttattatttaggttcctaccctgttccaatgatttttatagtattcatttggggaatcgtacatgctggtggattaattgttggtcaaacatggttaataagtgaagctaaagaagcacctgaatttggtaacagtctattcgtttcgttctcaaatctcggaattactttaggaaccactattggaggctggttcatttcaaacttaggtattcaccagcttatttggagcggctttatattcacactactctcatttctattaattataataaaactaaaatttttcaattctaatagccaggcttcattatcaagctagtacattttcagttccaaattcgataaagtgaaactttaatcagccctcaccaatcggacttttattaatttcaacgtttagacagatacataactccaaaactaaaacgtttattgcaattatcgatatggaacattttacaaaacaacttaacatggtaaaataatattcggacaggagtccaatattattaaaattaagatggttcaagtcggaggaaggcaccttagggtgtcttttctttatttgcaaatggacctgctcaattattgtgtaaaaaacataaagtaagttgaatccattaaaatacatgagtgaccccttgttttcccctcttattaaaggaggaactattatgggatttggtggtagttgtagtagtggttgtggcggcggctttgctttactagttgtattgtttattttattaatcattgttggagcttcttgcttctgctaaaaaactattggaaaagacactcttatatgaactgaacccaaaaaattagacaaatatattaagcagctactaaggattgaacatggaaataaaaaccagtctatgacccatttttacacgtatctcggctgaaccccgaaaacatttgcttccagccaattatgttcttgttgtggatatcaaaataaagacgttaaaaatctaaacctacgtgaatgggactgtccttcttgtcgtacacaccatgatagggatattaacgcaagtatcaatctaaagaatgaagcgataaggcttctaaccgcaaggactgcggggttagcctaatcaattagagttcgatagaactctttacttaggaatccctcacttctaaacgaagtgaaagtggggtagttcaagacttatttaattcacaaatagaatagcagctttttttagttaattactgttaaattgaaaagaaatgaaattgattaatagtaatcaaatcggttttaatatagtttatttttatgggaatatgaagtttatacatgcaattttgcatacataagcataaattatttaaattaatatataataatataaagtttattttaaagtaatttagataattggttaattatttatctaaaactaataaaggattgatataaaatgtcaagaattagcataacaaagtcccaagatagtataatgattgcatggcaatcagcagagattaccatccctttaaaagatataattactatatctacaaatgacgttcctcataacaagctcgatcatgttgtttatattggaactccatcttcctcaaagaatagaatactgatacatactacaaacttaaacttcattatatttgttgttaatccatctatagttttagaagaaattaatattgagtaataacgttatagaaagacattaaagtataaactaaaatctcatgaacaatcgttgataaatagtcattagcataaatttagtaggggaacgatgtgcctcttgttataatggaatcaagatgcgaaaattatcatttttaaagttggagagataattatggatactagttatagatttagcgtttttgagttaaaacatttattgcatcttatatatagtgatctttgtacagcgtatgatgttgtaactaagaaagaaaacgataaaaagtataacagcactagaatttgtaaataatgctcatagcacgtatctagaatctcgaagattatactttaataaaaagattgaacgacaagaattcgaggactttttttgcaaagttcaaaagattagaatgcgaacttaaagaagttatttcagaagaagataagaacacagcttggctatattcaagacatgaagactttattgaagatggacatattttacttactaaataaagttttacagaaattagaaaaggaaaaaaataaacgtaccataaatagagaagagtataaacggatctttaaagaagtatttgatatttctctgaacaaatactccgataaaattttagaaagaggctagcttaaactagcacatatgaattcacttgaggtagttagtacactttatttgcaatatgttttaagagtgagaaagcataaaattatatctcaccattgtaaagatagctataaaagtaaataatttgtatcttactctcaatagaataacttcccataatattgtattttaagaagtgttaatcttgagaagaataacagatttcatattagggcttaccggtggaattatgggtatcttatttttcatttttactatatttattgataatctaagtaagactctcaaagtagaaggtgcaaatgggataatcgttttaaattggctccctattatattatctgttattgaaattattggttgtttaattgttacatttaatgctaaaataggtgggtttttaatgattattgccgctattggtggtgttatttgtatcacactcttttatttattgccaggtgccctattattaattagtggatcaatgagtattttttgtaaagaaaagcaaaaactcaatgtaatatagagtgatttttcccattcctacttagctaaaaagagaaaaaactgaaaaaacatgtatctaatcagaccagtatcatgcatagtatattggtctgatcggattttaaaaacaattagaagagaaataatattatagcctttttatatggggaaagggctatttgatttatggggagactttcatccaatgtgcatttcttccttttgaaacaagtttaacttcgccggataattgtaaggtatttaatgtcttactaattgtactcttagctatatcagggtatatgctactgatagtttcttgagtaaatggctgtttttggttgtatacaaaattttgaatgcgttcaactttactttgattacatatagaatcttgtattctgttgtgtaagtctttatatgcctctaaaataatagttaagaaattttttaaccagaaactaatattatgttcattacaataccaattaactgaagatttacatatagcattgtagtattctgattgttttttattgatatatttatctaaacaaacatattttacaaatgtatgtccattttttattaataataaatgcattaatatctgagtaagtctaccatttccatggctaaaagggactatgcaataaaaactcaatataaatcgagcaattagtaaaagtgaatgtagctctttatttttatataataaattgtattggtagcacaagtcgtctacagtttgtggaatcagttcatgagggagcggatggtaattggttatgtgtattccgctatctttaaattctggtatagaaagtggtttttgacgccacattccactatctgaggtataaaaattcattacttgaaaatgtaattcttgtatagtttctggactaatagataaagtgcaagatttttgatgtacaacagccagagtctgatagtaacaaaatatcgcatcttccggaacagattcaggtaccttgttattaaaaatgagttcttttattcttttttttgaaatttttttatctgtataaatagtagtataatttttcatgtagtgtagaggtataattttttcgaaattattaaatatgtctggcctctgttcttgataagaagctaactttcctttatactcactaatttcgctaattaagtttattaattgccttttaagttcaacatttatgtacttgtcttcaaagaaatttcgcacgctgtgcctcctattattccccatcaacataacataaaatcatccattctattacaatctgatactctagttctctatttattaagaaattaaattgatattttagctattaatttaattcggacaaaaaatattattctctcacaataaaaaaaaattatattaagatttttatagatataatgttaacacggaatcaataaaaatgaaagcctttccatgataacgtataaagtaattttaatatagtaattttaaataggcaattgataaggataatttagttttagacagaaaagttttttatagtaattcgttttttatcatataattctttgttgcttaattataatatttattgtaattgctgaacaactcaccacgtaacgtcttcatgggtagtttgaagtgaaagattcttaggcacaaagttctatcgaactctaatggaattgggcattcccactcatgaattgttaaatcttaaataccatttttttgtatccataattagaatataatggactagaagcgtcaaatgaaattttaattagtcctgaggtacagaataaacggtttaataaagcgctaatctaaatggcacaagtatggacaaaatataactttaggagacttatataagattgttgttccagtaggtaggcattctgctggtactatgctggtggaattagaagtttgaacggggagagaatgtaaatatttactcctatgacagatagtaaagtaaaatatgatgataaaaaagcaacgattgataccatgctaaaatttgacaaaaatagcaaacacatacatatcaattttacaaggatacattctgacggtacagcttgaagtagtcctcaccctaatcgaacactcattttgctgctaaagtaaaatcagaaaacttaaggaatgattaggggtatttaggaagtagatagattctaaaattacataaaggtaatatccgtgataattttctctattttgagaaagtgtgactcatttctttaaattttgtaacaaatcgccatagcataaacctctatcaaaaactactgaaaatgcaaattactattataaaaatgacaaatttgttaaaaataggatttaggaagttttcttgccatttaactggtaatattgacatgtagggataaaaaattagaaaaggggataattgattatgtttacagtaaaacaaaagctagttaccgtagcaactactttagcattaggctctggatttacttttggaataacacctgcttctgccgcatcgaacgaaacttctacaaatcatatttccatctcgtcttttgagaaacaactgcaaacacatttcacaggttatgttgtttctgttgatagtaattatatgacgattgtggatacaccaacgatagaaaaagctctattgtatcaagaaaattggtgggatttagttaacaaaaataaaatattgctcgttccaactttagataataattcttatactatcggagataaattagatgtttattttaaagcaatgacaatgtcgcttccacctattgcgatgtcacctatcgttgaaaaagtaatagaatagcctagaatactaaaaaagaagagttggtacaaactcttcttttttatgaatgatatccatcaattcaagagtaatcctgtcataagaagcttctatgcgtataatcttgctatttagcagattgatatcagttacaatcatgtaatgtaatttgaaagccgattgccacctttaaaatgaatgaatcattaatattattttatctgcatattaataggacgttcacctatcctatacatattttgcatttctaaaagaaaaaaattagaatacttcaataatataaaaaccaacaactggagcgtaattgatgtatattttttcaacaaacgaaaggagtatttacatgttaactgaattacaaaagaatttcctctcaaaattaaagatttcatcaaaagaaagtatccaatttgataccttgcatcaaattcttttacagatggcacatttaataccctgcgagaacatagacattatggaaggacatcctcaaaaaatttctcgagtaaatcttgaagaaaaattacttctaaataatcatggcggactatgtatgctatgagctaaattcgttattatattattttttaagtgattgtcaatttaatgtttatcgaatagcgggtactctttatgatcccaaaataaaaaaaatggaaacctgatgacggacacgtaataatcattttagaacacaaaaatactaactacatactagatgctggtttcgcttcacaccttcccttacatccggttccctttaacggtgatactattaagtctccaactggagagtatcgtgttcgtaaacaaagtacagctaaaggtacctatgtattagaaatgagaaaaggaaaaaatggagaaacttcacatttccttggttctgaacctagtcataattggcctattggatatgctttttctttggaaaaaatcaatgaagataaagtaaatgatatacaaaacattattataacgaatccagactctcctttaaataagggacatataatttgtaaattaattaaaaacggtcatatttcacttacaaaacaaagttttacacacactcaatatggggagaaaataaaaaaagaaattaatacggaacaataccatcgaattcttcaaacagactttaatatttttaaataaataatattatgttttcggaatattatacagatattcaacgaatatttttaatgtattagagtgttgtgttatagtgcttccgaaatgaagttgcattttagtgaaagcctaataaacgggtctatgcagcatatgtaatgtaaattcaaaaagcatttaataccttttaggatgtatgttttagttatttataaggagactatttttaccttcattttttgcgaaatccctacacagtattaagaagaggttctaacaaaattgttagagcctctttatcttttcgcaacaaaagaggattttaaattttttatccaaactgattgatgtagatcagtatgagaaatccaattccctgttttatgagaaccgataaattcattatagggggggataccaaacaattaagtaagtctcatttttatattatatttcatcaaattgacataacgcttttcctactatattggattgtccggtgggtattgctcctttttctaaaatctcattaaactgcttcaaaaaccatcacactccttcggataagtttaagtatatatttttcaaaagatatactttttcctcttttatagctgaattagaatgaggattttaaaaacaaacgaaaaaaataacctctatacaaaataagagtgattttttaggatggcatattagttatttatatgatgaaaggggtgcttaagagaagcatccaaaatagtgatttttttgtttatattttcaatacaatataatgctttttaataatttatttcatttaaaataccacaatctttaattcttttaaatttatctatcttaacttgttagtaatagaatttcatttttcaataagtatatttttctacacataaacatgtacacaatatgataaattttaataaactcctaaaaatacgtaaaaaagcattggattttgggtatataaaaatataaattcacaataatttagttggaatcttactttactcactaattctaactaagtctatggagtacaagaatagtgggcttatagcggaattaatgaaggtgagatatatcattaaaaaacattaaaaataggtccattatttgtaaacataatttttcatgcatatatgaaaagagatatatccttttatttatagatgtagtctaaactatagttgtgcatgagcctgagtaggaagagaaaagataggcataaaaaaagtggatttctggcatcttaaaaatttatagaatagtggatacagattatgtcctttatacatgcatgagagtatacattgagtattaataatatagtagaagggagtgtagagaatgttagagaatgaagctgtattagtgaaaacatttctagccacctttggtggtttttgcggttactttttcggtgcatgggatgtattattaaaaatcttagtaactatggtctcagttgactacattacgggaatgattgctgcaggttataatggaaaattaaaaagcaaaattggctttaaaggtattgctaaaaaggtcgtgttatttcttctagtaggcgttgcaactcaattagatatgatatttggaagtaatagcgccattcgagaagccacaatctttttcttcgtgggaaatgagttattgtctatctcagaaaatgctgggcgtataggtattccgcttccacaacctttaatcaatgcagttgaaactttaggtggaaaaagaaaacacaataaaaaagaagataaataatgggggaatttagtagacttaaaaaacatggtatacaatgaatccagaccttattatcatttataatgtgtacaatacattaacattgtgcccaaaaatgaagttgcttaaatgattgaaaataactagtaagtttccttctatgcttaaatatcaatttaatttacccttgtaagaattggatatcgtatgcttatttctttcacaaaaattatataggataattctttaaaaaattgttaatagaattaattatttaatatgctcttttagatgattttctctttttgttttaaaatttctatagaagaatatcaacatacttaaaaaatatacataaaaataatattataaaggatgatgtgtttgaagcaatttaaagagatgctagaccaaggagcgatttctattggccaatccgaccaatttggaaaacctttacgtcaatttgatgaagtacaatatggaaatgaagtctatcttgttatttggcatcccatctatagagaatttgtaggttctcatgaatcagggaattggattcctaatactaatttacatcaatctatatggattaagaatttaaaagagcattttgcaaacaaaaaataaaaagattccaacaagtttattagagcctttttgagatactctttagggatttcttcaaagaacgaaattaattatattttatataactaagacataaatataaaaaaagacatcaaaaataataagtcgtttgttttcgagatgattgtctttttacaaacaaaatgcgggttgtaacagattttttacagctcgcattgtattagtttggaacccatcgtacagatcatatattttaaataatccaaatacagattgtggctttatttatattttaaacttgtatagttctttttctttttaaagttcgtgcagatgataaacaattaacaacttgctgatttaacaaagatttgttccatttaattgtaatccgttaagctagtaatcaacgaacactttcattctattttcttactatttgcctttaaaatatgtcactcatacttccgatcattctatttcaaatagttgaagttttctctcttataacttttaaattcacaaaattatttgactcctcttgttgaactatcattaatatatatatatattaatgataagtttaccttatatagattattagtatttttttatcaaactaaaaaacgttgagtacattgggctaaagcttttctattttaaaatatggtgcaaatccctaggcaaatgtagattatataaacatgagaaataaaccagtaatctgaggtatgcattcaatgcaaaatgctttgaatacagaaaacagtatgctataagattttagagcgactaacaatatgtctcaactacatataaaccaatttttcacaacccttatgtaattgctaaatcaaattcaagtaaaaaatataatatttatgtgaaatccatagcttttaagaataatcgttcattaattagttcaggagcgaatagcaaaaatactcctttatagtgattgctattataacaaatcaagttttctactcattttcaacaaatataaaatatgcgtacaattgagattaaaaataatcaagcacatctatatttttcaattgtacataatattggtgaagatagtgcataagatttaattattttagtgaattataaacaaaagtcattataggtctgaaatcaaacgaaataaatgtttaagttttttttgatataactctaattagtttaaaatatattaaatttactgttcctaaatgaggtgaataaaaaatatagcagtcaacaaaaatacgttcatttcgaacgttaattcaaaattaaccataaagagtaaattcttttactcataaaacgtgcagggaaattcttttttgtattgtatctacctgttttctacacatctctaatcgtttttatacttgtaatcatattagtaaccaaaataattcctgcaataccaatggtatctctcaataatatcccttattcctcataaaaagatacaaccatagtatacatatagaacaaaaaatttaaaataacgcatttctatgcgattatcttgaatatttatgatatttgtagcacttttcatttataaaaaagcatagatatcttcctctatagaggaagatatctatgctttttctttttggattagagatatactttactcaaagccgcaggaaaagagttaacaggtgattgaattcaatttcatcaatggaatagggggcaacctgtgtgaaaatgaattaaacaattgttgcctttaataaatggattctctaattacacctgttaatctatgaggaggaggacagaagtagttaagaaagcggtgaatggatcccttaaaaaaattcaagaaatatgatgttgattcttagagcaatgaaagagttattaccctgtttaaggtgtcatgattctcctagaaaagtaggcagatgaagaatggacgatatgcatacggataacgtgactcgtaaaaagtacgcttcgtatatgatatgtatatttcaacgtacagtcatcaaaatgtaacatgggaggcgtgaaaatattgtgatgaataattggcatataccgtttactccccacatagaatgtgcagagcggttttagaggtacttgaaacccataaatgaaagtagaagggggtgaataccatgcatgaatcgcaagaaggtagagatgttccgaatgggataactaaacataaacaccatataccttttcagtgtatcgtttcccttccatcaggttttcaaattgaaaagccgaatgatttgaaacttgtttacgatgtaagtcatttgtctatgacgaaagatacgtgtaaaaaacgtattgagattgatgaatgtggacaagtagaaattgacttacaagtattaaagattaagggagtcctttcttttatcgggaatttttctattgaacccattgtgtgtgaaaacatgtatacaacggtggacagaaatccatctatttccttaagttttcaagatacggtatatgtggaccatattttaaaatatagtgtgcagcaattaccacattatgtcattgatggtgatcatattcaagtacgtgagttacaaatcaaattgatgaaagaaaatccccaatctgctcaaatatctggtcttttttgttttgtgtatgagtaagaaccgaaggtttataaaaaatttaaatatacactatagtgtctttatcaggattgaaagtgaaaaactataggtatagatgttagctagttatcttaataattcaatagtatccaaaggatttaactatgcacgataaaaatagttaataggaggaaaagattttatgctaaaatatcattttcctaatgtatgtgaagatgaattaattaatatatattcttatggggattttaaaggacaaggaaaatatatatgcctctttaaaattgaaaaccaatcattcttattttggagaaacgataaaggaaataaaatatatacaaatttagaatctatcagtgtagaaataataaacacgaataatacgtataatcaaagtcagaatgtatgcccacaagatttagttgatacgtataatcaaagtcagaatgtatgcccacaagatttagttgatacgtataagagggtatatcgaagatagtcaagacttagaaatctatttaattcgctacaatgcaaaacatgaaacagtaaatgtgccaggtacgggttccttatggccgctttcagcccaaagtccaatcggaaagtgtggagagccgaatcgatgcgcgccacaccttgaatggaatcctgacttagattgttcgtgtagggatggagaaaagtgtgcccatcattcgcatcatttctccttagacattgatgtaggatgtacagacttaaatgaggacctaggtgtatgggtgatctttaagattaagacgcaagatgggcacgcaagactagggaatctagagtttctcgaagagaaaccattagtaggagaagcgctagctcgtgtgaaaagagcggagaaaaaatggagagacaaacgtgaaaaattggaatgggaaacaaatatcgtttataaagaggcaaaagaatctgtagatgctttatttgtaaactctcaatatgatcaattacaagcggatacgaatattgccatgattcatgcggcagataaacgtgttcatagcattcgagaagcttatctgcctgagctgtctgtgattccgggtgtcaatgcggctatttttgaagaattagaagggcgtattttcactgcattctccctatatgatgcgagaaatgtcattaaaaatggtgattttaataatggcttatcctgctggaacgtgaaagggcatgtagatgtagaagaacaaaacaaccaacgttcggtccttgttgttccggaatgggaagcagaagtgtcacaagaagttcgtgtctgtccgggtcgtggctatatccttcgtgtcacagcgtacaaggagggatatggagaaggttgcgtaaccattcatgagatcgagaacaatacagacgaactgaagtttagcaactgcgtagaagaggaaatctatccaaataacacggtaacgtgtaatgattatactgtaaatcaagaagaatacggaggtgcgtacacttctcgtaatcgaggatataacgaagctccttccgtaccagctgattatgcgtcagtctatgaagaaaaatcgtatacagatggacgaagagagaatccttgtgaatttaacagagggtatagggattacacgccactaccagttggttatgtgacaaaagaattagaatacttcccagaaaccgataaggtatggattgagattggagaaacggaaggaacatttatcgtggacagcgtggaattactccttatggaggaatagtctcatgcaaactcaggtttaaatatcgttttcaaatcaattgtccaagagcagcattacaaatagataagtaatttgttgtaatgaaaaacggacatcacctccattgaaacggagtgatgtccgttttactatgttattttctagtaatacatatgtatagagcaacttaatcaagcagagatattttcacctatcgatgaaaatatctctgctttttctttttttatttggtatatgctttacttgtaatcgaaaataaagcactaataagagtatttataggtgtttgaagttatttcagttcatttttaaagaaggtttaaagacgttagaaagttattaaggaataatatttattagtaaattccacatatattatataattaattatgaaatatatgtataaattgaaaatgctttatttgacattacagctaagtataattttgtatgaataaaattatatctgaaaattaaataatagtataagtggagggattaatatgaaactaaagaatcaagataagcatcaaagtttttctagcaatgcgaaagtagataaaatctctacggattcactaaaaaatgaaacagatatagaattacaaaacattaatcatgaagattgtttgaaaatgtctgagtatgaaaatgtagagccgtttgttagtgcatcaacaattcaaacaggtattggtattgcgggtaaaatacttggtaccctaggcgttccttttgcaggacaagtagctagtctttatagttttatcttaggtgagctatggcctaaggggaaaaatcaatgggaaatctttatggaacatgtagaagagattattaatcaaaaaatatcaacttatgcaagaaataaagcacttacagacttgaaaggattaggagatgccttagctgtctaccatgattcgcttgaaagttgggttggaaatcgtaataacacaagggctaggagtgttgtcaagagccaatatatcgcattagaattgatgttcgttcagaaactaccttcttttgcagtgtctggagaggaggtaccattattaccgatatatgcccaagctgcaaatttacatttgttgctattaagagatgcatctatttttggaaaagagtggggattatcatcttcagaaatttcaacattttataaccgtcaagtcgaacgagcaggagattattccgaccattgtgtgaaatggtatagcacaggtctaaataacttgaggggtacaaatgccgaaagttgggtacgatataatcaattccgtagagacatgactttaatggtactagatttagtggcactatttccaagctatgatacacaaatgtatccaattaaaactacagcccaacttacaagagaagtatatacagacgcaattgggacagtacatccgcatccaagttttacaagtacgacttggtataataataatgcaccttcgttctctgccatagaggctgctgttgttcgaaacccgcatctactcgattttctagaacaagttacaatttacagcttattaagtcgatggagtaacactcagtatatgaatatgtggggaggacataaactagaattccgaacaataggaggaacgttaaatatctcaacacaaggatctactaatacttctattaatcctgtaacattaccgttcacttctcgagacgtctataggactgaatcattggcagggctgaatctatttttaactcaacctgttaatggagtacctagggttgattttcattggaaattcgtcacacatccgatcgcatctgataatttctattatccagggtatgctggaattgggacgcaattacaggattcagaaaatgaattaccacctgaagcaacaggacagccaaattatgaatcttatagtcatagattatctcatataggactcatttcagcatcacatgtgaaagcattggtatattcttggacgcatcgtagtgcagatcgtacaaatacaattgagccaaatagcattacacaaataccattagtaaaagctttcaatctgtcttcaggtgccgctgtagtgagaggaccaggatttacaggtggggatatccttcgaagaacgaatactggtacatttggggatatacgagtaaatattaatccaccatttgcacaaagatatcgcgtgaggattcgctatgcttctaccacagatttacaattccatacgtcaattaacggtaaagctattaatcaaggtaatttttcagcaactatgaatagaggagaggacttagactataaaacctttagaactgtaggctttaccactccatttagctttttagatgtacaaagtacattcacaataggtgcttggaacttctcttcaggtaacgaagtttatatagatagaattgaatttgttccggtagaagtaacatatgaggcagaatatgattttgaaaaagcgcaagagaaggttactgcactgtttacatctacgaatccaagaggattaaaaacagatgtaaaggattatcatattgaccaggtatcaaatttagtagagtctctatcagatgaattctatcttgatgaaaagagagaattattcgagatagttaaatacgcgaagcaactccatattgagcgtaacatgtagaattaaaatctacctaaatccagaaaaataaaagggttaaatatacaattcttgtaccaatattttgagtgattagatgtaggatgaaatttaattgtatgctatttaacagtagagatattaaaaattaatttatctatacattaatagtatagacatacaaacataagagagcattgtcttttcgtaggctacaatgctctctatttactatttatttttcttttgtatcttcaaattgacgttgttctaagcgttctattgcagctcgtcgtttagtatcatcaatgtttgtataaagagatgttgtttccatagaattatgtcccatttgatttgctaataatactaaatctttattttcattatagtgattagtagcataagtatgacgtaatttatgagggcttttcttttcatcaaaagcccttgtgtatttctctgtaagcttttgtatagcattaacagaaatttgcgcataggatcctttataatttgttacaaatagaatatcttcagcatcaggacacttgtaacgagcagcacgtacttttagatactcttgaacatcatctagggctgtttgtgtagccaaaatagatgattttttatctccttttcgtacaactttaatgtaacgagtacgaaaattgatactagaaatagttaaactagctgtttcagatacccgaagtcctgtacctaaaattaaacttagaatagcaatatcacgctctctatcgcgtttgaagaatcttaacttaccgggagcgttttcttttagcatttgctcatattcattagataaaaagcgcataaatttaatatcatcattattgtgaaaaataacttcagaaatttctttcgctcttgctgaagcgtcaattttttccttatgaatttccattttggccataacatttctataaaagtaacattctccattatcatcttcagtgtttttggttaggtagttaaataatgattttagagctgaaaatgttcgtataattgcctttgttttattaccttgtctctctaaatagcttttaaacctttttacttgtttaagaggaaggtgttccaatgtttcaattggcacctcatgtaatttcgtaaccgttacaacttctccatttacgaaaacaagacgagaggagatcaaccaatgtaaaaacatttcatattcaattaaatatccatacaaagtagcaggggagaggttcgttttctcttcaatatattcaatgatataccaaggcattttttctttatgacgttctacacgtgctttatacacttgtttttctcgattgctcaattttttcacctcaaacttcaaaacagtacattgattttctataatcaatgtactgttttgtcttaatttgtctaattttacattaaatacaattttaattgatattcttacgaaaacaactttatatagaatttccatttaaattaacttttaaaagtctttaatttattgcataaatatctctagatgctgcattgtcttttttatatgattatttttaaatacgtgttttttacgttcattccaactatggatataattgataatctcatcgaaatccattattgaattatttccatactttatagaccaatgtacagtagctaaaagctccataccataaggggtttcatatccttcaattaaattttttacctcttcaagtctttttaaagattcttcatcatgagagataaactctttagcttctaatattgcatcttcaaacagattaatatcagatttagaatttcgatcaccataaccacgaatataatgtccttctaaacgaattaaaacatgatttaaattttccgcatatggaccatatatatatttcacaaaatttaaacgaagaggctctccacactcttgtaaaaaataagctaatttctgtatttcgagaagcgaaaggtgatatcctggagctctgtattgctccattaataatagtaaaagagctcttgcttttgtcatttttggcttagttgtacctattttcatgctatttggatcaggatgaccagaaggttcatatagataaactgtagtatttaagtcctctaatgactttataattaaaggctgtacttcactccaatctaagcccccattaccacatccaagaggaggtaatgcgatcgattttatattataattaataatttcatttcttaaagaactaagcccactcttaatatcttcaattcttgatttattcttccaatgccttttagttggaaagtttataatgtattctggtgatcctaagaggtgtgttttatatataaacattttcccaggctgaacttgattaattttacatgccttctgataagctttaaaattatcagggaatgcttgtttaaattgaagggcgataccttttcccattacaccgactgtattaacggtattcaccaaagcttgtgcatcagcttctaacaaattgccttttgttattttaatcaatttctaccaccaccttaataataccaattaggttttaatttaactgttaaagaaacattatgttcagttaatattttttcggtttcttctttatatttttgactatagactgcaatcccgataatacagtcaagtgggacatattggtaaaccagaaactctgccattcttctacgctttctatcattgtcttcaatcgtgtcatgccaatatttactcttcattatatcccaatcaatgttgtgcaattctttaagatcattgtaatactcagtgaagtgcattattccatggccatcagtaaaacaaaaaggaaccccgttttgctttattttttgcgctgacgatacaaaataaatgagaggcccttgcccctcattatattgtgtgacattacctttatagatactgtataacataggtgattttggagcgaaatagaatggaacatatttatgtaatgttccaaatggttctactggaactgagtaataagctcgtctgttttgtatatcattattagcaatattacaatatgtttgcccattattcatgatgctagagacacacacgagtccatttgaagataatatttttgataaatttctataatgagtcatatgatatataaatgtgtttgaatgcattatgtacctcacgatattaacgtttaattttatttatattataacacactataattatcaattaaactcgaatttaatgtaaaattatttcttaatcattaacaattcatacagcctgtatatagcctccccctttattctttcatgtaagtttcttctcacatataacacgttcatgctatgaatgtgtttcataaattccattattacatatatgaaatttgatttatgctcaaaagaggacaactaaattgaagtgcccccgaaagttagacaggtcgtttcattaggcagcctctagggtatgagcccggtattgtactgggctcataccctttaattttgccttaattcttttatgattatagtattctatatactttgctaattcttgtttgaaatgtgttatactttcaaattcttttcgatacagaaattctgatttcatgataccgaaaaaattttcaataacggcattgtcataacagtttcctttgcgagacatactttgtgttatgccacattgcttaagagaatgacggtattgtttcatttgatagtgccaaccttgatcagaatgaatgaggagtttgtcttgatctgttacacgttcaaaggcttggtctaacattgttgaaacaagggaataggtcgttcttgaaccaattgtatacgtgataatttcaccattaaataaatctaacattggtgataggtataacttctccctaaataacttacactccgttatatctgtaattcatttttcatttggtttgtcggcttggaagttgcgatttaaaatattcggcgcaattttcccaactgtccctttgtaagagcgatattttttcatacgaacaaggcattttaaccctaattctttcataaggtgatacaccattttatgatttattttgtgtccacgattcatccgttcatcataaatagcttattacttgagctttgtcttgtttggtgattgtttcttgttttgaactacagcattaaacctttttaaatatacattttccgcttgtagtgtttctattgagccttctactactggttttatttttttatctttcatggatggacgcccctttttctttgaatgtagggcatacaatcctcctgtttcataagctatttttcatttccgaagtgtttcataagacggaatattggtaatgtctctataaagggataaaacattcttcttatgtgcccaatcaataaaataatgtcatacatacattagaaaaaacacacttggaggcgattctcatgtcaagaagaagattttttgatttacgcgaaggagatcgaattaaagtattctcagctggtatatttgagggcgaaggaatctttattcgcttcgctgaagaaaaggatgaagactttattttttgaattaaaaacaatagaaatgattgtgacagagaacggaaatgtgatcgtgaggattactaatattgttctataatttctcataagaaagcttaggaacagctgttaacaaatcatttacgaatacaattccttatccctgtatttaatgatgaaatgaaataaccattttgtcttactattttattggaactttaagtccatagatttatcctatagaaattattgtctacatgtagcacacttcttttgtaacccatcccctgaaacggtaagtttaagaattttctaacacctgaaatttttatctagaaactcttgattatcacctgttattatccggatatcttgtatggtaaaacctttttcaaatgagaatgaattttattccaattcctcttcttcttagtactgttacaaagtttttaaatatgaaaagctttaggttaacttgaaatgatttctcccatatttcatccgatttggatataaaaaaataaagagggtgtctcagagtaagaattttactactttaagacaccctctaatatccataattatatatcatttagttccgtcaatatgtttaagaattttctattaaatttatgatagaataaaatactaattgtacattcactcaaaccttaataaagtggtggaagattagttggcacaaacataatattcatgagatcaaatggagtaccggagtttaatgtcacatttatatctagcgttacattagtattatcacttgctactatattaccgatattaatatctgaaaaacgagctccattatcattaactccatcgttatttgtagtggtattaacatttgaaacagtataaactctaccgtttatagtaactcgaatagttgaatttcctattgaagatactcttaaataaagattgtaactatttccattccctctaagcgtataacgagctgtcgtgttgctttgttcaaatcttaaggaatcaccttgatttccaaatttttcagaaataaatgttcgagtttgattattcacttgagtggcatgtattggcgatatagtaaatcctgtataatcttctggcgccaaatggatcatagtaccattttcattagcggcatagatattattttttctgttatgcacagataccaaataggcccgtgctccaccaggtgttcccgaaggactttctatatttcttatttggttatagtgtaacggtcttgttagatcttcgtttctaataactaaaggaaccccagaaatattacggataaaataatctgggaaatagtttgaatttccacgggctgaaaaagcaccacaccttaaacttaaagttgtttgaaaggattctgtctgccaattcgtagaggtagcaacgccctctcgatctgtacctgaatccagccaacttctaacaaatggtgttgataaaggagggaggaccgtgctgcaattaaagttgtgattgagattagtcgcccctatgagaccagatgaaactcctccgctataattaaccctggcactattcaatgaatgagttgtagtactacccggtaaaccaccaatattagggaaggtaatagaaagcctagtaccactaataccagataatatataattcgaattaacttggaaaagagaatataaaaatggccagttttgtgctgtaaatgattgtgtctgctgtggtccactaccgctagcatataaattagcgccagaagataccataagactctgatatttaaacaatgaccaaatggatacatattcaaatacatttaaaaacatatatgttctaaattctaacatatcgtgtaaacgggtgtttaaccctctaaacgcagtttgatacgtatttatacaataattagaataatctcttgtataatttctcaggtaatctcgatacgtacgtaatgttgctgctgaaataccccattcatctgcattaagaataacatctctaataaaagaaagatgcatattggctgcctgtgcaaataaaggtaataataacaactggtatccttgtatctggaactggggtaatctatttagaaataattgctgcattgtattaaccgaagaagttattgataaaggaacagggttttgagtagggtttaaaaaattatctacttgttgattaaactcccttatattcgcttggagccctatcaattctgcatttacacgagcaagggtatctgtattaagtctttgatttaggaattgttctgtctcccttaaaatatcttgcattagatttgtactaccactaggaaatattatcccccataattcactcaatatcctttttccaataagactccccactttctttagcaaaaaactagacacagttccgactacaggagctacatataaactatgatctgttcttttccactccatccattctttttggatggtatctaatgatttatgttcaaaactaaatggatcatgggctactacattatacgcatcacaaatagttgttcttccactattcaatacattattcatataaaattcctccttaaatatctagttttatattaaaactaaactcttttgataataacgagtatgtttaagaaactacttactacttactacttacaaccacaatcacaattctgactttgattatacgtatcaattaaatcttgtgtgtatacattcaaatcttgtgggcatacattctgactttggttatacgtatcaactaaatcttgtgggcatacattctgactttgatttcaattaatggaaaaccgtagagtttctatccttaagttgatgggcatggggttaattcactatgttaaagaaaatgatgtttatgttaatggctcttactctagtttttgtaccaactctcgcttcagctgcaactatagaggatggaaagaaatacaacgcaacacaggaggaattagaagctcaagttaaagaattagaatatattttttcggtacttatggtaaaggatgataaaacaggtaaatatgttcttaataaagaagaattagcgaaatcttcatataacaatgaagaaaaagcagctattatagctggtgtttatgtaatgaatgatgaagaaattccatctaatatgtactctagtaacgtttgggaaagatgttggcaggatgcattaggtattagtaaatcatattttaatcaaataaaatcgtatcttaagaaagaggattactggggagcattgggaatgctttcgttgcttgggctaccatataagcctgcgttgttatttgcttttgcagtaacttgcgggccagctccagcttatattgcacctaaccctcatgaataataagcctgatatcttataagtaaatgaactaaaattagaatctcttttgtaaatctattgatgcaaaagagattcttttatctttttaaagaagtatttctgttaaatatgaaaatattaagtatattctgttgaaaaaaagtagatttgaagtaagttaaactttcatatgatatgcttattctatactaactaattttcaggtgaggagttgatcggttattactagtatagagaatatatataatgtttctgtattcttaatgcttttatctactttttgtttttatctgtatttacgaaaaataaaaagagaaagaaagctcactggtttcgaatttacaatgtatatcataacacaagttagttacattctttggggaatctatattatttatataaactttggatgatattttttgttttatgaaaaaaaggctattaaaaaagggtttgagataaatatcaaacccttttgactatatataattatttcactgcttcttttaattcttttccagctttaaaagcaggtgcctttgaagcggcgatttgcatttcttcacctgtttgtgggttacgtcctgtacgtgcagatctttcacgtacttcaaatgtaccaaaaccaagaatctgtactttttctccatttgctagcgcatttgttattgtatctaaaacagcttgtgttgctgcagctgcatccttttgtgtaagttctgctttttctgctattacttttgttaattctgtcttattcattttttgcacctcttcatatgtaattaggtgactattataacgtgtgtatacttatgatgcaattaatattgtgcatagaaaaagccctagcaagagctaggggacaatttctgtgtggtagtaagaaagaaaaacatgttcatcgtacagtctaaattgtaacatctatattaaatgatgaaaagtacttattctagatgttctacttgtttccacatattctataatgaaaaatatccctctaattcatttcatcttagaaggatatttccaatctttttcttttcgagtatttagagcaggtttagatgaatttgtagaaagtgtttgcttttctattttatctaatctctcatctaatttttcaatagcttcttttgtttccttcagctctaatttaatttctgtcagcaaacggagtattgcatctccttttgtcattttcaacagtaatcgctcccttacttatattaaaagtgttactgtatatagttgaaatttcaattaaaatagaagtagctgcacctagtcatattgaatatccttttacttattcatagatatataatagcattgctatggaatttctagcaatatcaaaggaatagttccattggtttcactattatttctaatcagtgatgtattagccttaaaaagggaaaacgaaaagtcatgaatatagaaacaataaacgaaatgaaaaaataaatatatgagtccaggaagaaaagagcgttatattaaagattataatgcttccaaaaatgaactagaaaagataatgacttacgctaaatttagcttagaagctaaaaaaagagaaaacaaggtaaaagacgataaaggaatttagatatataattgtggtatgacatgcagaaagtagctagaaatataaaaaataaaaggtggtataaacatgaaatcaacaggtgttactagaaaaatagatgaattagggcgaattgttcttccgaaagagttaagaagaacgttaggaattgcagaaaaagatcctatagaaatattcgtagaagatgaaaagattattttacaaaaatataaatcttatgatgcttgtgcaataactggtgatatttcagaaaaaaatatatcattagcacatggtaaaattgttcttagtccagaaggcgctgaacttttaattaaggaaatccagcagcaattagttaaataagaatattcttcttagtacattacaaagaaaaagacatctatatagatgtctttttctttgacttaaaccaacataattttaaaaacactacttttacaatggcaaatatattaacaatacttcatatcacattcattttagcacaaataacatcacgtattctatatatataaatataattcaaggaaaatacataattcctttttaacaattcactgtacttagatgctattgtagagtgtatcatacatagttaataaaaatggtatgatgggaataaagaactatcggaggtattgttgctgctattcaatctccctgtagaaagtagacagcacgcttagaaatatgagtgtaatatgaactataattttttcaaaacattacgacaaggttatggttcttttttacggaaaacttttcctgtgagttgaaaggaattattataatcaaactattttttaatagaatgatacctaatttgaaattaattttagtgattgacacaataatccctagaatgctacggttttaatggtaaagtaataagaggtttaatgtatagagatattacgtatatgatgctaaaaaacgcctgaatactattagtgacagggaatctatattcgcatatcccctaaaattagatatacagataatttgattaattaaaccgtacatatagagaggaagaaagtaagatgtttaaaaaagttacatcggttgtagcttctattataggagccagcctgctactaacagcttgtagtagtgaagagaaagagactaaaaatacagcaaaggcaactgacaagaatgaaacaaaacaatccattaatttaccgtatatagcggagatcccaacaatggatgtaacaaaggcaaccgatagtgaatcaatgaatgtaatgcggaatgtgtttgaaggtctgtatacactaggaaaagataacaaagtaattcctggtgtggcaaaatcgtatgaagtgagtgaagataaaaaaacatacacattccatctaaaagattccaaatggtcaaatggaacacctgtaacagctgcagactttgtattctcctggaaacgtgctgtgaaccctaatacagctgcggaatatgcatttctattctttgatataaagaatgcaaagcgaattaatagtaaagagctacctgtagatcagctaggggtaaaaacaattgatgataaaacatttgaggtgcaattagagcagcctgtcccttatttcattgatttaacaacgtttgcaacatttttacctattaacgagaagtattttgaatcacaaggaaagcagtatggtttagaagcaaagcaattggtctataacggcgcatttacattggataattggaagcacgaacaaggttttcagttgaaaaaaaatccgaattattgggatactaaaacagtgaaattagacgaaattaactttgatattgtgaaagataagtcaacagaaattaatttatatgaagcaggtcaaattgaccgtgtaggactaacaggtgagtttgtagataaatatagaaatagttctgatttcaaagagcgacctgaagtaactatgcagtttttacgtatgaatcaaaaaaatgaagtattaaaaaataaacatgtccgtttggcaattagtcaggcaatgaataagaaagcctttgtagatacagtgttaaataatggctctcttcctgcagatggttttatacccgctgagtttgctaaaggatcggatggaaaagacttcaggaaagagaatggagcattagtaaaagatgatgtgaaggcagccaaggaaaactggaagaaggcaaaacaagaacttgggaaagaacaagtaacactcgaattgctcacgagtgataatgcaatagccaagaaaaatgcggagtatttgaaaggtgaactagaaaagaatttagaggggctaacggtctatgttaaaccacagccacgcaaacagcaaattcagttgcttctaaatagtgattatgatttaggtgttgatgtatggggaccagatattcctgattcgattacatttttagatttgtttacgacagatagtacatataactttgataagtattccaataaacaatatgatgaactaattcatcaagtgaaaacagacttagctggtgatgaaaatgctcgttgggagacaatgaaacgagcagagaaaatattattagaagatggagcagtcgcaccattttatcaaccaggtagatcgtatttacagcgttcttctataaaaggtattgtgacgaatgattttggtggggaatttaactataaatgggctgaagtgaaaaaataagcgaaaaaaaggaatcgaattaattcgattccttttagtttgcatagtaattatgcacaattacatatttaattatcttgttatatcgacaaaaatcgacatttttttcaatacgattatattagaatcgaatataacgatattggatgttacaaatatactgagggatattagggaattcttgtttttttagaagggaaaatattatgaatgaagcacttaagagagaagataaagtttcagaaaaaacattaaacaaattcttgagtaaaattattgatgaaattgatttccaaaggaaaaatcaagaggatatcgctaaaataattggcatttcttcaggaacgctttcgaagaatttaacagggaaaaatcaatttggattttggaatttaattagattattgaagctattgtatgcgggtgatattaataaacaaagaaagatgttacacaccttctgttctgtcacaacaagcaagaagaacttgaggattgccatggaatatgcaaattcaaaaggtgatttatcacttcttaagcaagtagtggatcaagaaagcaagtcttcactcgcaatgaatagagaatgggcctatgtatatgaactagtatggcttagaaatagtggcagtattaaaaagcaagaattgttagctaaactggaagatcgtaagggtaaaaaagtaattaagacaaaagagatgaaggttttatacggcatattaacttactatactatgtatgatttagaaaaatataattctttattcgagtatgctgaggtattatcaccagacgttaatgcgataactgatagttttattagaacatcttatttaggtaggattaaagaaggtttagcatatgcgtacctggtgcaagatgatctcgaaaagtctaggcgtttatgtcaggagattctagatttagaagatcctgaagggtgttttcatcttttaagagcatcggcacttgtatatttagcagagtcttataccttcgaatgctatgagcgtgcatccaggtatataaataaatctctagaacaattagagccatgtaattttgaaagggaacttcaaagaaagcagtcgattcttaatacatatgcttttattaagctagttaataggaaagagttggagaatataaaaatatatcatcctgctgaagaatcatttttagagattgttaaggggaactatcaaaatgcaattgatattcttaataaactagagaagaagaatagatttttaagtccaatgcaatattgtattttaggtatagcaaagaatgatattactttaattgaaaagtcaattgcgctatatgagtgtgttggtaataggttctacagcaaattccctaaaaaaatagtagtagaatttaataaaaatggtataatatatgagggtggtgctatatgaagaaattattatttgtagtaacaagtattattttggcagcaggaattatttatactgctggtagtaaagagcaaccaaacaatttagttgaaaaagattcagaaaatttattagctagaatgggagatcccggtggtggaatgggttaacctttaaataattagaatgcgattgtctcataggaggcaatcgcattcgttgtttttagggatatttcctaaatatcaaattcgaaatacaagaaaagtttgtgaatcattcacaaactgatagctgatacgaaatcaaatttttaaactatattgttagtaaggttgcaaaaacccttgtgttatcaaatctactgataacacaagggtttccaaagattattccgcgagggcggggcactgaaaatgcgtagcccctttatacaggctaatattaagcaagtgcatttaactcacgtatcataaaaaaatactgaaaaataattttacattcatttggcaaaatgcttttttatgaagtaggtgtagtcaataagaacctctaacacttcttgctgtttttgtggaggcaaatcggatattgctactttaattaattctaatttactttcgaggggtgcatttcgcccgaatagttcatctatggagacattatgtatttcagcaagattcatgatggaatctgcatcaggatcagctttcccatattcccaatttgcataagtagtgcgggcaatgtttaggcgatgtgatatatcggattgggtatatccttgtttttttctcaattcagcaagtcgtttgcttagatgggacatatcatcaccttttcctttctgatttataaagttagtgtaaaacagaaaaggtaaattgtgtcctaatgactaataataagtcatattttaaattaatttgtaataattagtttaaatgttatgatgatagagaaatatttagagttctatgagcaaaaaaaacaggaagaaatcgaaacattaaatcgagtttcttcctattatatatactaactaaaataatgaatttcctatatctattgtggccaagttttgacgtcttgtacgctctcttaaataacgttctgtagtcatgatagattcatgccctaaatagtcccttattttttttagttcaatacccttttccattaagtaattagccatgaaatgcctacaagtgtgaggagtgattctatcctgtcggtaacgcagaaaatctaaatttatttcttctatttttttggccacaagagaagagagatagtccgctcgataatttgatccatcagctttagggagaaaagcagaagtactcgatgtgtctagttctgttgtttgtttacgtaaacttcgaacatggcataaagcatccaatgtatcttcaaagatgcgaacttccctacttttattccctttaccaactacacgaagtagataggcatttaaagatgaatgaaagaccaaatctgcccatttagcagttgcgatttcttcaattcgtagtcctgttgtagttaacaggaaaaatgcagtgtaaacaaaatagttggatttttttagttcatctaagatctggttaacttcttctggataaaggtcacgattgaccagctcttctttttttacggatacttttttaaggcgactactaaagttgtctgagagtccgttgttatcgtacacatattttaaaaactgctgaactattgttttctttttacgtaatgtagtggcagcatatttcttacttaattcatagaagtagatttccatctcattatgggataattcctggatggttccaattgattcttttatgtaacgaagaaaatgagaaagatcgtgcagatactgttgtttggttcgctcacttctttttttcgttaaagatggctcatcgtgtaaaaatagataaaccaatgattcttcgcttaattgcgaatagtcaatattacggatacctaaacccataatgttttcaaaatgagagctatcaaaaaaatctgattttgattttacaatttggttattatgttcgtaatttataatattcaaatttaaacacaaccttttatagaatgaaatagtaaacaaatgttttcatatatatttttatgattctaattataccacaataaacagattatttaccgtggtataaacttaaatgattaaaataatatttttaccttaaaatttaatgtttctgtttagaagatatataatggaaatgttaaactcgtttttttgtacatttcaatccaaatgcggtaggaggagatttttttgactcatcttcgtcgaaaaattttacaagaaatccataatttagaagatacacattgttcaatttgccctctgaacaatctatcagtgaattgtacagatgagcaagaacaggcaaaacaaagaaactacaaacattgcaaaggttgtcccattttcgattccatccgagagaaaggagatcaattgaattctttgtcgaaaaagagtacatttaataaggtacgagaacgttatatggaaaatccatttaaatatctgcagtataaggagtactcaatcaaagatgtagtaaaagaaacaggtttaacaaagtatcaactaagaaaatttaaagaacagctagaatgaaagtttcggatgaggtgagatatgagctatttatctttagaagaggtatgcgatcgggtaggtttaacaaaaaatcaattaggttatttaattaagtataaacacatcgaacctatcaatctagatacctggaaagcagatgggggatattgctttgaaaaagaggatgtaaaaaagctagaggaattatacaaagattgtttaacattaaaagaagctgctgaatttctaaacaaatctaagacatacgttcataatgcagcaaaagatgggatattgccttttaaagagattgctaaagggaaatctactgaacgattatacttaaaatcggatttggagattttcaaagaaagaattgaaaatagatcaaaagaggagtcgaaagaaaaaaagcagcatttaagtttataccttgatgaaaaggtattagaagcaataaagaaaaaggccgaaaagaaagggtataatggctacaagaagtttgctgaagacattttaaccgcagaagtaaaagaagacatagaagaatagaaattccagagagaatagacccctaaaaaaacaaaaaacgttataaggggtctatttttgtttttaataaatttataaaccatcaggtctaattgcattgcctgaaacgccaatgacgtttacaagcgaatttgagaggtcgttttttttttttttgttcagtcaaaattgctgttattacaaaaaaaggaactgattataagagaaaaagtttcacaatctataatattgatatttttggaaaataaggtattgtttacttaatagtatgagaggcgttcaatagaagaaagtaatttgatataaaacatagaaaatacattacgaaaaagaaaactttaaatttacatatttatattatagtaaactaactaatatttgatattagtctacatactaagaaacttctttttcaaatttaaagctttaaagctactatcaaaattaaaagggttaatttaataatatcctaatacagtaggggttatggtataatgtagatagtaactgaagacgtgcggtgggaggttgcaccctttctttctcttaattaaagagggaaaggaggtgtaaccgatatggattttttacttcaattattacaagatgctacgaagctattcattacagtattcgtaacaacttatgcaactgcttatgcaaataagttagttaaaagtaataataaacgtaaaagaaccaccgcgtccggcaagacaaaaggtggttcaaaaagaaaataactaaaaacttgcaaccaaccaccttacagcggcagttacatattggacgggatgtttccagcatcctgtctttttagtttatgcaattaagttaagtgctatactttatatacattaaatatgcattcaatatatatctaatctacagtaaacataccatatatttattttttggtcaataaacaagcaatcatgatttcattcaaagtatatgtggagtaaattacaaaagcctaattctattcacagtatactaaaataatgagataagtctcccttattttagtatactgtgaatagaaagaaaattcagaaccgatatagcgatgtttatagtatagaattcattagaaatttatacatcatgtaaaaagtacacatttacgaatcatgtctgtaccccatgcccatcaacttaaggatagaaactctacggttttccattaattgaaattttcagcaacactctcacttcacgtctaaacgcttatagagaaacgtgtcgcgcccaaagattgcatcgggtttgctaagcgctcataaaaagaacgatgtgtaaaataacgaaacactaaataacttcccataaagaaagcccctagaaacattgcatataacgccgttgtaatatgattatgcccatcaaaccaatatacgagaaatatagctagtagttgaattatagtaaagcaaataagtggtatatgatcacgtataaacaaccttatcatttttctataccagtatcccaagtaatatgcaatctatatccaacactacgaatcgtttcaatcgcaccttctatatgtaacgtttgtaactttttacgcacacgtgttgtatttacacttaatgtattatcatcaacataagattcactatcccataatttattaagtaacacttctctactcacaacacgcggataatttttcattaatgtctctaataaaatagcttcgtttctcgttatatcaatctcttcatttctaagtttcaatacaagtctttcaggatataaacaaaggccttgttgctcaatcattcgctcttctagtttcggtgcataatctccatatgcacgtcttaaatgactacgaattttcgccactacaacttcataatgaaaaggcttcggaataaaatcatcgccaccattttctaacgccataacttgatccatcgtgccttcacgggccgaaatgaatagtatcggacatgtagaaactccgcgaatttgacgacaccaaaagtacccatcaaaactcggtaaattaatatctaataaaactaactctggttgttcttctaaaaaaatgtttaatacattttgaaagtccgatacaataactccttgataaccatatttcccaacatgtgtcgataatagttctgcaattttcatatcgtcttctacaatcataattttgaccattattgaactcctttttaatccacaatctcaaatatacttatataaaataaatactacctcttttcacaaaatccgtaaattaaaaaaggatgcttttatacaaaagtatcctttttcgtcccttatctatttaatatgaaatttactaaaagtaaatcctagtttctccacataatccatccctaattccatacgcgccgttttcaacggatccacaacttggcaaacttttaaattacctgctgccgataataaaagcgttgcatcagctttagacattgctaattcttcatgtaaaaatgtcaccatattacgtacagcacgatttgctgcatcatctagcaatttttctgaagcaatcgtcattactttttctttttgaatagccattggtagtggccattttttcccttttataatttgaactgttacagttacctcaccagcaacctctactccactaaccccaatttcaccatcccccattgctgcgtgtaaatcacctaacgctaatagtgctcctgggacattaactggtagtagtaatgttgttccttctttaatttctttacagtccatattcccgccgtgatcatgcggtgtgccacatgaaatgctctcttctttcggtgcaataccaattaccccaatcattggattaatcgggatttgtagttcacttgaaaacaaaacatgttcattatgtattgggacaattttcactgtattttcatttaactcattccctattacaccaaggtttgcacctgtagttaaaacgccctgctctgcaattttaatcttttcaatcgttacggctaatatatcgccaggttctgctcctttaacatatacaggtccagtcgctggattaattcggttccaatctaattcttgaaacacaacatcttcagaatcgatttgattttcaaagcaatcatatgtttcaaatacaagactgctcccaatttccacttccatacaaggtttattttctggtgacattgagtaaatgatatggtctttatgaattcgatacataatacctctcccttttatatttatctactattactaattagctctttttatacaagctcctcttaaaattaaatgttatttttatgtaaaaaagcacgcagattgttttataacatacactctttactataacagaaaggtggtatcactatgccccttattccatacaacgaaagtgatgttgatttactagctcgtttaattcgtgctgaagctgaaggcgaaggtcgccaaggtgaggagttagttggatgcgttgtagtaaaccgtgtattttgtgattgcttagattttaaacaactccgtaccgtacgcgacgctgtatatcaaagccccggcggatttgaagcagtacaatatggatatttttatcaacgcgctcgtgaatcagaaaaagaaattgcacgaaaagttttacaaggtgaatggcgctggcctgcacgatgggctctttggtatttccgtccagttggagcttgtccacctgaatggtataatcagccatttgtaggacagtttaaaagccattgtttttatgaaccgagtggtgatgaatgtccaaaaatgtattcacgctagcaaaatttgaaacgcaagtacttagaggtctaagtacttgcgtttcttttagctttattttagaaatctagtaatgagatgaatttttcgatgcccaccacatgtattaataacgatatacgtgggccactagactgattcataatgagcttataaataataataaataattgtttttgattttctttcattatttttttattgtcatgatggcaaatcgaatacaattgctccattaagttagagtaatctttgttagaacgaagtatattgcaaacttttactaaccattctttctgtctttcatctaatgtgttgtaaaactctgtatttctctctcgatttaccgcaattaatttttcagattgaaagttttttatccaatactctgcgcggttacatatcgctatcatagcatctaatgtataacttctatctattttttctaatgtatcttgtaaaatagatgaatcaaaatttaatagcggtaacgttcctgctacttgattaaatctcggatattctttaaactgcctatcaactttagagagtttaattgcatcaaataaatcttcatttttgagcgttttattttcatagctatctttcaatcgttcatactctgtataattacgaatcacatcttcatccaacccaatatgaaaagcagcgcctggtttgtatttggcaaacataaagagaattacttctggtatatacactttcaataaatcgcttggtgtaatgctattccctgaagaactagacattttttcatgattccctttaataccaatgaaatcgtaagcaacgtaatgaggcgcttcacgattgaatattttccttgcaatttcttttgatacattataactacccgtttctgatgagtgatctcttccacccggttcaaaaataacatcctctatcatccatctcatcggccaatcgattttccagtttagtttcattttatttgtatttaatacggataattctttttcatttccgcattcacattcataccggactgtttttaatacttcatcaaaatgtgtaatagttgttgtatcttttccacacctctcacaatataatgtagctggataaaaattgtttcgctcttcttcactacactctccagttttaaaatccattaaaatatcatatatttcttttcgtttatacaaagcctctaaaatatttttgttataccttccacttctatattcatcatgttgataaataaattctacttcaattccaaatgcttgaagcgatgtttcaaactctttttcaaaatgctccgcatacgagttatgacatccatacggatctggaatatcacagtatggcataccaatatactttgcaaaagatggatcaatattttttggaacttttctaaatcgatcataatcatcccacgaaaatataaaacgagtctttttccctaaaccttgaagtgctcttactacgaaataagtcgttacgatttcacgaaagttcccaatatgaacagaacctgaaggactaattccagatgcacaaacaaacgtttctttatttggatgtttcctaattaattcatgtgctacttcatacgcccaatgcatttattgctcacctcaattattttttgttttcgtattctcagttttatgcaataaaaaaactcccacccccaagattattcatcttgaggacgagagttgttagcttcgcggtaccacctcagtttgttaatatgtcaccatattaacctcttcaggtacggcaaaatatgcttataccctatctctataacgggagaacccgtcgcaccatccctaaataaattagttccttgcgcagctccaagtcttttttcgttaagatgtataccgctctttctcagctaccagagctctctgtacgtattctttcttaactactcttctcttccatgccattttaaatattagttttttaatatgataatttataacacttttattgtcaaacttttccgaatcaaaaacatataattacctaaaaaaaattctttatcgcttctaattgaattttgtgactacactcatcacaacaatataccccttttggtttttctttaaatcgcttatatttttcactgccttcgtaaacacgaaatatattcttacaagaaaagcaaacaatctcataaaacatcatatgcattttcctctccttgtttatacacttttttaatcacttgtgagaaggtcatttttctacagcataaattttaatatcctttgactaaaaggtttacctctattcttatcgaattatattaatatcttataacgcgaggtgaacatcttgttcagtaatatagaattagttttagatgctaaagcaagtttagctgaaggaccatgttggaatgaaaaaaagcaacttttatattgggttgatattatggagagaaaattatgcatatacaatcctaccgctaatacgaaccgagtaatttcactcaatcaacaaatcggctgtgttgttccatatttagaggatgtactactcttagctatggaaaaaggcttttattctattaatataaataccgaaaaactgacacatatttttgaccctgaaccacatttaatagaaaatcgtttcaatgatggaaaatgtgatccagctggtcgtttctgggcaggttctacagatacatacggtatgaatactgcaggttccttgtattgtttacatcataatttaagtgtagagaaaaaagtttcacatgtaaatacatcaaatggaattgcttggtcacctgatcatacatacttttactttatagatacacctactaaaaaagtggttcgctatcaatataatatacgtactggagacattcataatccaattgatgtaatcattttctctgaaaatgatggtctacctgatggtatgacaattgacgaagacggctgtttatggattgcacattggggaggttcaaaaataactagatggaatccctctactggagaaaaaatattaagcattccaattccagctttatatgtaacatcatgtacatttggaggacctaatttaacagatttatatatcacaacagccagaacaagaatgactgatgacgaattaaaagagtatccacatgctggtggtatttttcgaattcaaacaaatgttaaaggctgtcccacctattcattttgcaataaaaatattggagctgaaacaatgtgaaccgtatcgattacataagacaagaagaaaagaaatatcacggcctttgctatgaacaatataaactatttgaaattggctcttggctgtacaaaccggttaaaacagttatggacttgatgggtcactttgaaggacaaaacaacttgcaagtacttgatcttggctctggcatcggtagaaatagcattccaattgcacaaaagataagaaatactagcagcactgttacatgtgttgagttacttaattccgctttaacaaagctacaaacttatagcaaagaacatgatgtattcgaggttataaaaacagaacaagcagcaattgaaaactatcatattgactctaacgcttatgattatatcgttgcagtatccagtttagaacatatcaaatcagaagaagattttaaaaacgtacttcattctatgaaaaaagtgacaaaaaacggcggtattaattgtttgattattaactctaacatacaagaaattgatttaaaaacgaatgaagaattagaagctttaattgaaattaatctctcaaccgaagaactgatacgtctattaaaaaacatttataaaggatggaaagaagtaaaagttgaaataaaagaattagcttataatatagttcgtaatgaaagacacattcaattaaaaacaaatgctattacttttgcctttcagaaataatactataaaaggtaaggatattttctcatatattcataggaacacccttaccttttatcttcataatattatttcgttattagttttcgtatcatctaaaatataattttcattcgaaatactaatcagctattaattgaattcattaactggaagaaatattccgcttcatgagtctcattcagtttataccatgaatgaagtgtatccggcgcaaatacatctaattttctcaatacctccatggcaaattctagaggagctacacccgatgcggtaataaagttttcactggatgatacaggtccctctttataaaaattttctcctttataagtaggacaaaccattttcatatactctaaactattgcttgtgtgatttatagaatccaagtaaccgtaatttgcaagacctatagttgcaccgcaaatggcagccacaattgtaccaagttttaaagcctcatcaactttttgcaaaataggtttatgtatttcttcactccaagtattccctccaggtaaaattaatagatcgttactctcaaggatacattcatctagggaaatatccggctgtatattcaagccccccattgaaataaccatttctttatttattccaactgtgactactttaaaaggcgctacatcttttttaaaatatctccctgtattaagttcagcaattaaatgtccgtactcccaatccgacatcgtgtcaaatacatatagataggcttttcttgtttgcattcaataacactccattcatatactacagttttaattacaaaaattgctcttttcattttaacattttattcaatatttatggtttaaaattccaaataaaagagcacttgtttccgcaagtgctctttttggggattttgagatatcctattaaagaaagttaaggttacttaaagttaataggtacttctattatatgcttgtcctttttatttgtgcataatcaatatataaatatctttaataattcttaataacttttaattatagttctctcttacattttatcgttaaaaaattggctttttctcacgagaaattatctttttatattgtacctatctaatactttttctaacatttctaaagttattggttctgcttcttttattaatcgataaccaatacgcccattcggttccgctgtaacttgctgtaaactctttacatcatggatccctttttctcttaattgcatatatagttgttgctccgacatttttgcctgcatcaaattctcttttacaatctctccgttttcaacaattataatgctacttccatttagaaattgttccaccttctttgatttcaattcaaagaaatgaataataagtagtatgcttgcaaatatgatggccgcaaatatagatgggactacttttctacttaatacaggttctacaataatacggccgattgatacaactataatgatttcagctcttgtcatttggctgacagatgcactacctgtcattttcaagacaattattccagtaaaagttaatataatactttcccaaattatattcataataacccaatcctttaatggtgtattttactatcattcccattaaagttgtgttttacttacctattaagttgttaaatccttcagaccatgatggaaataaaggtatccaaccatactctttacgtgccttattattggaagctcctctttcccaactatttttcccatcttgaactttaggcttaggtgcccctatcgctgctgcatatattggtaaccattctttactagttgctggataattatctacaatatttacgattcctgaaggccaattaagggctagcatagtagctcttgcagcatcttcgacatgtataaacgagcttatcccgtctgatgcgataatctcattattacgaacttgatttgctattaatccgttttccgcataccatgttcctggtccatataatgtgccataacgaagtataaccgattcaggtaactcagtaacagcttcttctaattttaatatgccattaacagtgacttgccgaggcgcggaagcagtaatatgtagtgaatctttttcagtcgtaaatgtatcccctggttcatacgcccatgaaatactttgagcgattattttctgtacccctacatttttagctgcatcgacaaggttacgagtgccttttgttctaatttttgcattatcctcaaaattccatgatgacaatgacgttaattgatgaataactacatcgggatttgtttcttctaatacagaaaatacagcctctctattaaatacatcagctattactggtatggcaccaacctttttcattgcttctacttgcgaagtattacggatcatcgcaaacaccgtgtgcccattttttattaacagtggtaataaagaacgtcctattacaccagttgcacctgctacaaatattttcatatatgttcctcctcatttagtaatcataaatgtgacgaaacatttgtgaggtatgtgacaattatttaatctgtgtattcattttcatgtaaatgtgaattaaaatcccaatatccctggaggtgacaaggatttatgaatattcatatttatacacttacgcaatacagagctacactatatattaattaaacactaataaaacctatttttttctcagaacctcctcatttgtacactctttttttattttcaattaacgtttaaataaaaaaacgtataatccgcatcattgccaattttcatatattaaatgcctacttcatacagtaataaataatgataaaagaaaacagagggtggttgtatatgacaatgacggatatttataactttatgattaaacatggacgtatgccacacttccacgatgaatttccgttaattttattctggagccaaaaaagtggctgcacttcactagcaaattggttcttttatcaaattggattatatgaagaagcgattaattacgatccgtttattcataactacgagtatgatatatacaaaaattcttttttttactatatacaagtagctacagaattaaggcttaaacaaaaacacgcgtacaaacttgttagaaacccttataaacgagctgtcagttctttcttatcactcctttcaccaccccatatagaacatccggaatggagacctattcgtcaatttctgtacagggatgagaattgtaataagaaaatctcctttaaactttatctatattatttaaaatcttttgattctaattcagacataataaacccgcactatgctccacaatatatacaaaatgaagaacgttttgtaactaattatatctacctagaaaactattctaaggaaatcgcgaaactagaagatcaatatggattaaaaaaatctcctttagatttattggaaaaatcatggcaccatcagaacgactatgctatttttaaaggggactacgcagacgctaacataatagaccccttatttccacggctcccaacatatgatagtttttatgacgccgaaactactcaattagttgaagacatatttaaaacagattttaccatatacaaatacccctttacgccactttaaaatatataatttcttgaatttatatattcagaatatacatgctaattaaatgggatggagcacatataaaaatgtgctcttttatcaaggatttattaaaatctcatattacaaccaacatagtgaatccgaatattatatatttaatgcagaatcttaaagcttttccttataatgagtaaactaaaagaatctcaatcggtcattctaactagccaaccatcagtcttaaatacaaacttatctctgcccttctcaataagtatattattggggtagagacacatgcccatcaacttaaggatagaaactctacggttttccattaattgaaatgaagattttgtacatgcttaaacaagcgaaaatgtacatgtttatcttgacatttacattccagatttacaatgctataagttttatttaacttcatccatagcaagtagtatggaactgatatatgcgtttcagaactaaataattttcgcattataatatcacctctaaaggtttgttaatttatacattcctcttactaaccatctgtatctcttcaaagatacaaagtaacatttcaattcgtttgattgctggaaagtatgtgtcatcatcatagaaaagatagattttttcctcttcagcttggtaaagcatacgtatatcaaactgattttggattgaacgaaagaaactttgatcctttatatttatattggaaaatatctcaccaattggactccatgcattatcaacaatgttgtttaattcatccatggatatatgaaatagattcgaatatttgattagagtatctttatcgtcgctatctacctcttcgtgatgtaatttcatatcttgaattaagtcatcaccccagcttttaaatgaatcctcacaatcgtattcttcgaaattatcttgttctaaatacgtcgggaaataagctgatacgggaattcctaatctatacatacgcataaataactccataagatacaattgcgatgtatagaagcaggaaagatcagtatctaaagagttttccgcaagcataattatttcaagtaaagttttcgaatcaattaaatcaattgggaaattggagtcttcctctaaataagaaacggcagccattacttgttgaatggattgttctgaaatcttgctgaagtctatttctcttgagtgctctaaacaatctaatatgtagatttcttcttcatgtttcttatctgcaagtaagtcatgcagtaagtgagcatccttttgtatttttaacgaaagtagatactttcttactttctggtgattgtatgtaaataataatttcatacctggttccccttcgtcttttctcgaatcattgccgcaagacggattataatttcataataagaaagtacccattcatcaaatgagtactgttcataaccatcctctagaaattcaatcaaaatatggctgggatacgcttcactttgataggtgttaaaagaaaattcatgtaacacgaattgaaaatcagattgtgttatatgttccgagcctatacataaatagtaaccagctgtatcgaagtaacatccttccgcagccatagaactaatatccgaagcgaaattcgaatacatgtcttctgagctaaataacgtcccatctaacaggtcttcttcagttccaaaggcaaagtgacaaaatatacgtgtttgctcattaaaacgcgcaagcgattcgaataatagttcacttgtgatatgcaacttgtccctgtgaaaatcattgatattgattaagaatgggatgttatatttgcgaattaatttttgtatgcgtagtatccgaatgtatactttcatctcatttccttgattaaataaatatttcatcttctagcccctgcttttctacatcttctagttgttcagtgaaaagatgtaaatgtagcatttcttttaattcacaatctggaccatttatacgaaatgaattaccactataaaacgtgacataatgtcgtagctgctcaaattgcttttcaaattcatctatatgttctaatggtatgttttctaaatcaggcatttcattcgcaataaatccatttataatcgattcaaaggattgacgaagttcttgattattaagaaggacttcttttgactgtaataagtcaaagaagtcactgtgattcatactcatttggatgcccccttacacacgaaccggtagaattaactgcagattagagttagttttgtcatctgctcccactatcacaataggtctctggttattaattatttttatcgtgattgcttcagacggtattgtctgtagtgcttgtagcagatattccacattacaagcaaacgtaaatgtctcttcttgatcgcatggaatttccacactcgcagttcctacttgtgagttttttggttcaattcttaaagattttgttccttctgaagtaaacattactaatgtcgagaatgccgacagctgttctaatgtattttgtaactcgctacgttctacagttacatagatatctgagtaatcgggtatcatccttgatgtatcaggatatattccggctaataatcgagattgatagataatgctctcccctcttataagaagttgcgtgtcactaatcaatttcatttctaatttagattctctattaaatagttttaacgccgttttaagggatttacttggtaagatgacttcaccatctttagcagcaggaatatgcgtacgttcaaaacgtaacctcgctaaacgatacgaatcagtagcagtacatgatagctcaccttccatggattttaaatttaaacccgttaaaatctttcgtgtatctgatactgcaatagcatgtaaggttctactagcaatttttgcaaattgctcttgtgtcatcgttatccagtcttctcctgattcgattttaatttcaggatattcttcatgatccatggtacaaaagctaaattgtttcttcgtattttctacgattttcagctcattgtttgtatgctctaaaccgatgaattcacttttgaatttcttaatcgttttaagaaccggagcggccgcaaaaagcaccttccccggttcagtacaatccccactgtttacgttaaagcgtgtcactaatgttaccgtctctgtaccgtctgaacccattagaatcattccttttgaattacactctaataaaacaccttgtaatgctggcattgggcttttaatgtctacagtagcgctagctttctctaatttttcaataaataaagtacggttaattttaaaattcatagtaaatccctccaaaaaagtaataaaaaaagaacagacctcatatcctgttcattcgtcttcctgctataaaacaaagctttacgcgctttgttgtttttttaactgttctatgagttggtgaatggcttctgtatgatcatgaagtaaccactctctaaaggacgtaatatcgccggatatataggtagataaccagcggctaagctgtttttcattcccatggctaatatttatggcctcatgaatccactgcaaacgagttataatatcctctaatccaccagtcgttgtatcttcgaatgttctagcctgtgcattatgattgtgattataggcaagcaaaacatccctagatgtaattcctaacggtttaactagctgttgcatgtctcgaattaataaccctagacttggttgggcatttgatggttctttctgtgaacaaccttgtttattcttttgctgtaacatggtaggtggtgtgaaataataccctttcttttgataagaaacatagatatcatttttacccttactatgtgtagtaagctctactttatgtggttttatattatataaatatcttcccacgccccaaaggactgctgccctttttaagctattggaaaatccaccttttacagcattgtaatcagattcttcactgccatcctcttttgatatccaacgttcattcaaaaacactgaaatggtacatttcgttgctttctcaccccatttttcataagacacttgccatttatcaataccaaagacttcatcaaatcggtcctgaatggcgcgtgcgtcaacaaatggagctacatacgcgaaaaaacgcccgttgctttcgaatgtatgtgtaatcttccaacctaattgttcaaatggaaattcggcttgtaaactttccatattcgtcataataatccccctacattaattggtatttcgaatctgggtgaatcctctctttctttcgaaattcatcaatcatttcacaaataatccctctattttcatgaagcagccaatcctcataggaagtaatattctttcccgattgaatggataagcgctgattcaacacttctatacttgtatgactgatattccttgctgcgtaaatgagacttaagcttactttcaagtcccttaaatcagaaatagtaatatctttaaatgtcgtagctttcgtattgaagtttttattgtgcgcttgcagcattgatacagaactgatccataaagggttagctagttctttaatttcttcaataatgtcatgtaaatgagcatcattttgcaattttctttgtgattttttcatgatgtttccccctaagtaataaaataattgcctaaagtgctggctatacaataactccaaacttgaagacaacacaaaaagggcttcttcaagtcgattaaaaatgtgcatagcaaaataagctatatatacactaatcggctcaaagaagccctttcataaatgaaacaagacgcaacttgcttctacaactcaaccacaacacaaaaaaggtgtgggaataaacggaatcaattaaacaataaatatagttatatattaatctatttttatatcatattcaattgtttttaagcaaacaaaaataagaaggaaaattatatgtagtggttttatgtaccatataataatacctctgtttctacgtttataactcccttcttattttcagttcttggcgttacttcatgtactgcaattcaaaataaagtttttctggcttttgcttctggtctaaataacaaagtatttctggaatggtttgttcgtctacttccatactttccatataggacatactttcactttcttgaacatttttaaaaatagaagtaggtagtttttctgcagcaaacacactcattttgcttcctaacttttgttcggatgcagcgttgtagaaaatttcgttcacaatgacctcattatcatctggatcatacatgtaccctcgttgtatacgtagcaatgctttacccctttcaaatatattccttcacacaaatggttatatttgtatatattgttattttgtataaaggtgtcaaagaatattatttcgtaaaatccttaatttgtataggggcagatataggataattaactttagcatattatttttgagtatttcattccttttaaatctacaaaaaagatacttaaagaaaatctttttgattataaatgccattaaaattatttgaattatgcaccctgagatttctaatatctccctgaataaaggtaaaaaagccaaccttaagtgcttataaggatggcttagtttgttgtaaataactttgtatttaattgcttaatctccccttctgcaagaggctgatagaatgcatgttgtaatccttgtacatgtaaggtctcccctatacataataaaactctaccaggaattaaatctaataacagttctttattaatacgctgtgcttgctgaatagtagaaacataaacaactaaaattgtagggttattccccaaccccctcatgataatatctttacctgactctacgaaatctttccatctagcaataatctttttcaagcgatcctttttatctgttaatagggtggagtagacaacaaaattaaactcttgatttactcccacttgcactgaaaaacttaaaggaggggtaaaaacccctttactaatggatggatgcataatatgccctaaaaaggatggagcatagcgtagatggcaaagcagatctatatcatgccaataacgtaggtgaacatatttaccgtgattatcaattcgctctggagcaaagaaaaacatatttccttgccagtattttaatagcttataaccattatcggataacgtatatgtttcttcaaagatctccatatcaaaattctcaacttgccatttttcaattagacgatagtaaagtaatccttgaagtgcatcatttattttcttacgtgaatatctatccttgaataaatataataaatgattaaatcgaacggatgtatgaacaccaatgaaagcaagtatggcatactgttcttctgttaaacgctgcttaaacttaaccaattcgtcaaaagaatggaatacatacgatttatccagttcatgtattcgatatatttgaagtccctgtacatcctcacttgataaatgaggaatagaagggacataagtagacaattgtttctctattgtacacatagtcatccattaaaattggaaaattgacgaattagattttttactttgtccctgcggataatttaggatacgcactgttccttttctatttttggcgtcgatattaagcagctcacatgtaacaatcgtttgattttttgcatcttctatagttggattggcaagattacggctcttaagtcctttaaactgaatacctggtgcaacctctacgaagatcccagcaatagcatctacccctactattttacctacaaagcgatcacggcgtttctttagttctaacagtttttcaattggatctgtttctagtttctttttatttcctctaaattcataacggccatctttttccactactttatcgatgataagttctactacatcaccaatgacgatatcctccggacgaacgaatgaataagaccagtgtgagtaccttaccccaactgttacgccatgaatttcaactaagacagtttgtgcagatgggatatgacctgatacggttcctgtgtataccttatttccttcttgcgctgttacttcttcatataatcttttttgaagtgctaactcccctgccgtgatagatacaacggcaaagttcccttcttctgttttttggaagtgttcaataataacaggctttgttctacccactaaccattgagggtttttaggaacgtttatacctgcctctgtaattggacaatatgctgttgtatgagtaccaatctgcattgtaagcacttgtatacgctcagactttccgtttttagtcgggaatagtttttcagatacgactgtaattaaacctttccctacagtgcgttcacgtttcatgcgggccaattcttctaattcatgttcacgtactcgctcgaagtgattaaaatttgattctaacagtgtgtcaccgtgtggattctctgattcaaaaaccattccaagttcttctacagtttgagtgtttgttttgtcttctgccattacatttttcctcctagaacgtaaaaaaggacacacctgtaccgttgggatggtacgtaaggtgtgtccttcacgtaaaatatgatttatttatatagttgttaatataaatataatggtatttttactcaaatgcaagaataattttagattgattacaagtggattttggggattctaattatagcagtcatagcaaccccatccttaatgtgcattaattaaaaatgcgataattgtaattctcgatttacacgtgcgttttcactacgcattctaagatttttaactgcccattcatcaatgccaaaatatctacataatccattaataatacatttctctaaaatcaaagcacaaagttcagccaataatattacatctctcatttgaattttgaacttattttttattagatcataggaaatgcttatttttagttttctaccaagttgtaagatatctctatcatacttattatttctatgtacaatattatctcttaatctctgccaaaaagtaagtaactggtgattccttgttccgataatgaaatttttttctctattatctatatatttctcaaagaaattaaggtactcattcatgcaagaattagacaggtctaattctttggggagattagaatcaaacttagtgagtacatcaaacaaacttgctaaggtttcctctagtctgcttaataataatacaagtgttgaggcagcggatgtttctatttcgaattccttttcctttaccgcactaaaattggctggcccttgttctaattcttttgtaatacgctgctcatttttttgaaaaagctttacaatagatgaaaattcattactagaaacctccattatttcagttatttctaatgattgttcagtcgagaatttactcttttcatttcccactagtattaagcacattgctgatagatacatctgttctattgccatcacttttatatattcatttttcatcacttatgttcacccgattcaatttatttaaggaattataaaaaaatttatatgtagtgattttaaaatatataattagaattctcaataaaaaaacatagtctcatatttgaaactatgcctttttaaatttaaagtatgcagttatctcttataagaaaatctagaatagtttttctaaccgtattctgctactttttgtatatttaccaacctcaaatcaaaatctagaatgtagttccactagatttaatttgaggtttaaaaactattaatcaaagaaattattcaattctttactcattgcgtttgatgttttttgctttggtttctcaattttattaagcgttggctgcgtagtattatttttatttttttgctgggattttaagcgctcttggcgttctttgtaactcatacgcttatgttcaggttgcttttcatcatttctcgaatggtcttccttatttttttctaagttttcatgaactgtaatactaatagattcgtaaactcttgctacatcttcatcaagtttattttcttctgtataattaagcgtttcagtaattggaatcgtattgatttctacatgtgtttcgtctgactctgttgctgtagctgaaattgaagtagattctatatttgtttccgcagtctctataattggaacgggaagtccatcagatgggaattcttctagtagtggttcaagatcattgggaatcccggaatgaatgatggaatccttattccagtcttgctctagcatagtaatagataattctttgttcagttctgctacctccatatttatatcatggcaatcttccatatgaggtaattctatatctatactttcctcaataatttcttccgctactgcattttttatatcatgactcacacgttctattggcatttcttctactaccggtatttcgctatctcctggttgtttcacaaagtctgctccatcattacataaaatatctttaaatttgtttttcttcttttccgcagccacgctgtcttcgattggaatcgctaccccttgtgagatagtattctctgaatttttatctaatgaatgagtagcattaacagtgggaccttttgctaattcgggctgactattatgatttgaaattaaaactttacgaggaccatcgcctgtgtaagaacttacaactagattttgttctaacttctcaatatattgcatagccttcatatagccaatcctgaattttctttgcagatgagaaggtgagatttgttgtgattcaataataaattccttaatttcttcatacaacttattttcagccccatcatcaatatctatctggtggttcatagttgcaggatcattagatagaatttcatcttgggacttgtgttccttataatcatccaatgatacaatgtgttgttgttcttcgtttatttctatagagctattctgtttgatctcatcctcttgtataggcggcaaaggttgtaatttcttcatgttctctgcgtctacatgcttcataggatttgcttttgcaatagattcattaataagacgaagacgttcattttcccaatattggcctgttcgctcctctacctgtattagtgcatgcgcgaattcttctttaggtacaaagttactcgtaatttgttggacaggttgcacatgattatcttgtacaatacgagctgcacagatgaatgcaccttgtcccataatatctcctggtgacataacaacttcttttgctttctgataggttgatcctaatcgactaacaggattgtcttgcataggtgaaataccttgttcagattctgcctctttaaattcttctttttcaccaaacatatctgaaaagatttttgcatcatatggtgttacatctccaaatatcattttattacggaatgagcctagtaaggtaaacatgtattgctctgtgaagtcgagagctaattgagatagtgtttggctagcaattgttagaattactttatatttacgagattgagcagggaattctttaaacggccgaacaaatgtgtagcatcctagcccgagagggctggggtagctactaacccttacggtccttcttgtcgtacacaccatgatagggatattaacgcaagtatcaatctaaagaatgaagcgataaggcttctaaccgcaaggactgcggggttagcctaatcaattagagttcgatagaactctttacttaggaatccctcacttctaaacgaagtgaaagtgggggtagttcaatttaaggagtattttgtttgcttagcttgatagcaatgtggtgtcccacttatcattatgacatttgcactggctatggctaaaaatgaatataataagattttctataatttagatagatgagatgaataggtagtttaattagttgactatttgagctgcatattgttctaaatttgcgagtggctcccaaaaagaaggaatcgtggacgtaccacatgataaagtgagaagctttaaaatgtttaccttcgtctaaatacaagttatacacacatatattgatcttattaaggtatatattacacataatattatgctaaaggtggcgaattgtatcatgaaagattttgttctcgaaaaagaaaacattattcgtaaatatggtgaatggaccgcttatgatattaaattaacggatactctatatacaagagatattcgacaaccaaatcctgcattaaaaaaaattgtgacaatgattcaagatatcacacaatgtgattttaaaaatcttcgaatcttagatttagcttgtttagaggggcattacgctattgagtttgctatgcaaggagcaactgttgtagggatagaaggaagagaatcaaacatacaaaaagctatattcgctaaagatttattaaggttggaaaacttaactttttatcaagatgatgtaagaaatttaagtgctgaaaaatatggtcaatttgatattgttttatgctctggtattttatatcacttagactgcccagatgtattcccctttttagaaaaagtgtatgaagtatgcaaaaggtttgtaataattgatactcatatcacttgtactcctaatgtatcagtactttataaaaattatgaatataagggacacacaatgctagaacactctgctaactcatcaatagaagaacgtttaaaatcaaaatgggcgtcattagataacgttactagtttttggatgacaaaatcctctttatacaattttttaacgcgaacaggtttctcttctataaatgaatccagaagtttagttcaagaagataggattactgttgtagcttttaagaaataccctatagaaattaaaagctctcctgaaacagaaaaatacattgaacccgattatttagaatgctaaaaataacactatatgtcattcaagttaaaatcgtaaagtatccctaaacaaaattatcaattctccaaaacctaattatataaatgcaatccgttgtttacgttttgggatactatatagttgtagatagtgatggaataacaccgcattactatcaacttaaagaaatacttccgaaaacaaaaaatgaaaagaataataaaaaagcttatcatttcgtgttaaaagataagtttttttattttagggtaattacaagtattgaaattcttttaatactctcataataaacttaaagatgctcttttcgaccttttaaaattaacccttcactatttataagccgtgatataccaaatagcaacaacatttccatttttatcgagtactctgccttcaaccgctccttcttcatatgctgttactacaccagttttaggatttacataaattttgttttcactaaataagacatatttgtattgttttccgcttggcgtcattgaccaaggtttccccactttaatgtgcataaattcaccttgcacgtcagatacttgataaaccgatttttttgattcttgattgtttactgctgcgtgagttttagtagtagcaaaagttcctaaacctccaattccaatggtagctgctaacgcaattccaacaaattttttcatgtgataatgcctccttttttaattcatacccgtatattaaacggttagtctttcgtatcactttcatttaccttacaataaccttaaaatgatttttgaaaattccggctgatgagagggagagtatgaaaaaaaatatattaattgttgatgatgacaaagatattattgatcttttaaagctttttttagaaatggaaaatttttttgttgtagaggcttcaaatggtgaagttgccttaaagtgtctagaagaaaatcatattgatttagctattgttgatattatgatgcctaaaatggaagctttacagattacaaaataaaaaaggggctcatttcgatttcttgttttatcattttagtcaagatggttcctttaaaacctcgtataggtaatcagtacgattaaatgggagacattagtcattgcttatcgatggtaaagtagacgtatatcatttaataaagaacccatgtaacagtacaaataataatttgtatgtgaacgtaaaaaacaccaagatggccctagagaggagaggggcagtcttggtgttttttagttaagattacgattttttaagtgattttcatattctgttaaccacactaacatcaagtcctttaattcaatcgtttcaatttcgcaagtgtattcttcatcttccacatatcggtgggtaatctttgtataaactgatcttatctctaaatcagaattgttaccccatcaccatcaagttaaagttttttaaggtcccaaaaatgaaaaatatgctattccatttgtagaattataggaagggtggcgtatttttctttttgttttgctaacttgatgttaatgtggcgtaaccttaagtatttaaaaattaaaaaagtcccttagtcatgttaaaggtgaacttgctcacgcaaatgatctgtaaatcaattcatttttgatatacagatcatttgtatgataatttttataaataattgctaaatagtgaatttacataaatgcttttagaagttcttgaattaatgggattgctccacctataaattttaaaactgccattgcgatttccatattattctctcctcttttttcgtattaagatgtgataaatctttataatctcattatagtaagcgcttacaattataacaatacatttttgtatgcaatattgcatacttatacattagatctctattattcattttttaatggtactatagcggggggagagtctttaagggttctacttaataggaggaaatatggaaagagtgcaagcgatttacagaaatcaaaaatttaagagttgggttaagcaggtattagccgtaggaggagtaatagggtgctgctatttggtgttatatgttttctgtttcttagttatcatgtaaatattatacaactaaactagtagagtcttgcctagagatgtaaggctcttttattgtatgtagtacctggagatgagcaaactacatacaataactctcaggtttttcagatcactttgtatggttccttgtttagaacactaattcctagcattgaaaacagaattctattgataaaaaaatatgtttttactagatacatattaaaaagacaagcataaattatattagattttggcaaaatctttttgccttggaaaaggatttaaatcttactgatagatttgattccttttttatataccataatccttatattactacgtaaatataatacagtagtaatggtttaaaagcaagaatattagtagggggtacgttcacacatccatcaactgaagattgtaaagtagcccttgaacaaaaaaatctttttttattgattgatagtaaacaagaaaggttagcaaatcaacaactaagagatttcttcaggtaagctaataaggagttattacagaacattgcagtagattttgcattaacggctgaggatgcaaaaaaggcccttgaaagaaaaggggaatatatgaaagctctacagcttacaaggtgaaaaagaaactcattttaaaactgtttttaacattttattcttttaccggaaaaacatgggaggttaagggtggtagtttacatttaatgagggataagcaaaaataattgttaacaatattaagtgcagcatcttaattgtaaaatcttttatattcctgcaagtacaattcctgttaaataaaaaatttttaagttaatggatgtggagtctcgccacataataaaaaggtagaaatatatttaatatattcctacctttgattttattaagtttagcatctatgatctaaatatcacagaaggtagttttcttttatacttctatatctttcccttctgctaccactgtatctcgccacaacacaagtagttttctaaattcagaggtctcaattttacattggttatttggagcactcataaataagttaatagcactggtgtaattaggttcaatgtagactgctgctacgttcccttctatttcatattgcggaactttttggtctactacattatctaaaatttgtatatactcagctgcttcatcatctaaaatatcttccaagaaatgagaaattatagaaatttcttttggcaaacgtattcttaatccgccaagtccatcacgataaaattcgtatgtatatttcattttttacctcctagtataaacaggatatgctgttattatctcattattttgtataatcatttctactttaaatccgtgggatgtttgtcctacatatctaactgtatcgacttgaatcttattatcgtatgcttctttgatagactcaagtacctgtactctatcccaatccttagggaaaaatgaagaaagcgcattttttgtttcaccgtctacttttacttttgctctatatactcccgcagaatttggtgcatgggtaattctaactatttctcctccacccatcatactttcatggtgatatccaacagcttttagtccccatgaaaaaggtgctccataagtgatgaatcaaaactatacggaacattgccatcattagttctgctactattaattcttccactactagcaaattaataggtagagcatttttcttcagcttgtttaaagtttggtgtgtcaaatctagagcgcaaaccatctccaccagcaaaagcaaatcgatcttttaatggtaagtggcttgaaatataaggtgtatcacctgaaaatttcgttaactttacagagtctccaagggaagttacttttccaattttgcctgctcctttatctccaatccatcctaaaccaaactccataaaaatatttgttcctcattgcacccatacctgctagtggaataacttgctttgtaacttcagtatttgttctgattcggttaatctcttcaatttgttctaatagttctagttcaactacatctgttgaagcgatccttaattgaaattcggtaagaaaagcttcattcttatcattaagagctatcaattccttactagaaatatttgatacattgaaatattcttacatggtataattttcttgatgattttggaactagaaggggtttaaatgatgggaaactttcaaagtaattttcaaacagctacacaaattgctacacaaatgaaaaatgcatcggatacaattcaaggtgcgacaaatcgttctataacaaaggcgagccgtactacactatctgttaatgctcaggcgcaagaagtgaatcaataaatgctagatttaactagacaattttgtgaggcctttcaacaagcaattgataatattcatttagtagctaaggattttgaaagaatggataacgaactacaaaagacatttcgctaatgtggcaacctacggtaaagggagaagggtaggaagaataagatgagtcaagatgtggaaaagcaaataaatgaatttaatcatgaattacggatagtatttgaaaaacaggatcgaaatcaaacagagattcaaatccagagacaagcagaaatggactttcacgaattgagaaatcgaaataatcgtttatttaataggattttagaaacatggcatggtgataaagatgtttctcatttttttatgaataagcttcaagagtcgcaaaatattgagcggaaattaacattggaattggaaaatcaaaaagaaacattacttaaagaaagacgtaatcttattgatttagaaaccgaccttacctatcggcaacagcgattaaaaagggaggacaaagtatgagtttaaatatgtatttaggggaagtacaaaatcagacccaaagcatgaatgctgtatgtgtcgctactatccaagctatggagcaagcaatccaatcaattgatacctttgcaactgatacggttttgcaaggacaaacatatagtagtgcaaaaatattttttgtccaaacttttcgtcctttagcacaaggaattatttatttatgtgaggaattgattcatcaaaatgatgcgtttccaagcgattttcaatcacaagttgcttccacagatgtcatcgaacaagaaataagagagcaaattcaagaaattaatcgaatggtcgcaagtatagaagcgattagtattgctacagtattgcctggaatagatgccatggttattgttttagtcgagatgagaaaaaaactgcaagaaaaattagagcatctatatgaatttaactatacgtccagtaataactaccacacagctcttcaacttgtagctagccttactgccggccttgctgaagtccaaagtggaaaaggatttagtcctgtaagtggtacgtttagtacacaaggattaaatatggattggaccgtttcgatccaagaaattgctgatgaaagaaaacgtcaagttgataatcttttaaaggaaggatcaatggaagagggagcggtgtgcaagaaacctcctgaaaaatctacttctgaaaaaattatagatggtattttagaaggtacgggtcaagcagttgaagatacaatagatggtgttgtggcacttggtaaatgggaaacatgggagaacatggggtacgcttttacgcatttaaatgaaaccttacctgctatgtggaacacattatcagattcgtttattaatgatgtaataaatggagacgctgaaagtcgtgctaagtggggaagttatgcttttacacaaattggacttattggtgataaggggataagtaaagtcactacattagcaaaaggagcaaaattctctacaggaatgtcttctttcgtaaataaattgccactgacggatcggttggcatttgcaggtgcaagtggatttggaagcaatcaaataaaaacatttgaagttttacgcaaagctcgtgaaacatttatgttttccaaaactagtggaagaagtaaagttaaagatgttcaagaagtaattcaggaatatgcagataaggttcttgatagagtagaggtgaaaaacgaatatcctgattcttatacagcatctcaaaaattacgtgcagaacttaaagatgcaggagttgacacacctccatatcctaatgcggcacatcacatagtaccttggaatgatattagggctgtggaagctcaggaattattacaagagatagggataagttatgatgctgcggtcaatggggtgtttttaccatataaaataaatgattatgtaactactgaagttttacatataggtagccactcaaaagagtatataagagaagtaacagaaagattgaattctgttatagaaatgggtggtactcaagctgatatagctgaagtgttacatgggataagaagagatttattagagggtaatttgcgattaaatgaacccaagaaataactatataaatggcaataataaaggagaatatatatgaagatttggcaattaaaaagctcgactgatgattatgaaacctttcaattattgaactatgaagaggataaaaaatattttaaaactggttttaattctatggtaagtttgtcagattcgtggacgcctaagtttattgaggtaacagatgaagggaaatcaagcgattctcctattttttggggaaagtctggtgtacaaataattagtgaaaaagccaagaatgttttagaacctatagtaggagataatattgaatttttaccattaattcataaacaaacaaacaaaaaatactatgctatgcatgttttaagggtgttggaagcacttgatactaataaaacaatctttgataagttaagttcaggtttaataataggatgtaaaaaatttgtatttattccttatgttgtccagcacgaaccgatttttaaattgaatataaatgggaaggtacatcctaactatcttttagtatcagatcaattcaaaaatgcaattttagacagtgaattaaaaggttttcaatttactgaagtgtgggattcagaagagggtgcgtaaagaaatttaatctaatttaattagattagtaatgtgaatccatatctaatagagtaaaaaataagaagcttatgcacttgtataagctttttattatgaataagtatagaaagtgatggtaatttatattcaagatatattttagaatcacaaagtaaatagtagtaaacgattttttgttacgtaatattctattttactttagaagataaaagaatagttaaggggaataagcatgaaaatatgggtattaaagagtgtattagataactatgagtctttccagttattaaattttgaagaagatcacaaaaaatatattgatggaaaaataaattcagtaactcatttagcaaattcatggggaaatatatatatagagtgtattgaaggagatattcatagtgatttccctaaattttggggaggaactggtgctccaatgattagtgaaaaagccaagcaagtacttgaacctttaataggtgataatgttgaatttttaccactcttacgcaattcaactagtgaggtatattacttggtccacgtgttgaatgtactagatgcgattgatggtgataaagcaatctttaaaaaactgattacaggccttatagtaggctgtgaaaagttcgcatttgattttaatatagttcaaaatgaaatgatttttaaagtttacataaatggaaaaattcatccgacggttgtctttatttcagacgagttgaaggctcttattgaacaaagtgaattaaaaggttttgaatttattgaagtatgggattcggaagagggggactaaataatctaataagatgcccctatatctaatagagtaaaaaataattaaattcaagaaacttacactatcgaaaagaaatttaactattaaatctaccatatgcataagtcaattataagatcaggggaaattcgaaaatatgtaaatattatacatttttgcaaaagacattcattgacacttgtgtatataagtaactatactcgttacatcaaattgaatacattataatacgatttcattattatgacaaacatgtaaatataaaaatagaaaatctcaatttgataaatacaatggtagaggtgtttattttaatgaagcacaaattaattgcaacaggtatccttgcaggagctatattatcctattcttcaaatgttttagcagatactcataaattccctgacgttcctacatgggctgataagtccgttaactatttagttgataaacaggtattgaatggttatccagatggaacttttggttcgagtgactcattagacagagcttcggctacaaaaattatgacaaaagttttaggtatacaaattgatcctaatgcaaaaccatcttttacagattcacaaaatcactgggctactgcttatattgctgctgctgaaaaagctggtattgttaaaggggaaggtaacggaatctttaatccatccggaaaagtaactcgtgctgctatggctacgatgctagtaaatgcatataaactacaaagcacagcaaatcataacgagcaggttagatttgaagatttaaaaggtcattggggagaaaaatatgccaatattttaatagatttaaaaatttctaatggtaccgagaacggttggcaaccaaatagatttataacacgtgctgaaggaataacgttttttgacacttgggggtagtgcaaattcttaagttgatgggcatgtgtagcgtcccctaaattacttattaatcttcttaaaaaaattaatacgaaagataatggcaatactaccgctaatattaataaaatagcttccattaaataacccaagcgctcatccccctctttacctccttttcaatatatgaaaacagcgttgtcacatatgcatgcatttgcaaaaataatacacctatatttgacaactttataacaaaaacaaatcggaatgattattatttattgcaactttattaaagatgtattatactaagttcgcaaactaaaacgtaattattccgttttgtattaaaatgatatttttcttctataattggggaaaatatatccgtaaaaagaaaagaggagaacttcatgcctaaaagattgactatattttcattcttacttatttttaccttaattttcgctggctgctcaaataaaaaagaaagtaatgccaagaaagatggaaagctaacagtttatacaacgattttcccacttgctgatttcgcaaagaaaatcggtggcgactatgtaaatgttgaagcgatttacccacctggtgcagattcacatacatttgaaccaagtcaaaaacaaacagtacaagttgcaaaagccgatttatttgtttataacggcgctgaattagaaccatttgctgaaaaaatggaaaaaacattacaaaaagaaaatgttaaaattgtaaatgcatctaaaggtattgagcttcgtgcttctactgaagaagagcatcatgatcatggagatggccataaagaagatgaacatcatcacgataaagacccgcatgtttggttagatcctactctagcaatgaaacaggcagaaaaaattaaaaatgcacttgtagaattacaacctgaacataaacaagaattcgaaaaaaactttgcagcacttcaaactaaatttactgatttagacgatggatttaaggcagctgtagcgaacgcaaaaacgaaagaaattttagtttctcatgctgcctatggttactgggaacaacgatacggcctaaaacaaattcctatcgctggaatttcagcttctgatgaaccatctcaaaagcagcttgctgacattacaaaaacagtaaaagaacataatctaaaatatattttattcgaaacattctctactccaaaagtagcatccgtaattcaaaaagaaactggtacaaaagttttacgcttaaatcacttagctactatttctgaagatgatgcaaaaaataataaagattactttactttaatggaagaaaacgtaaacacattgaaagaagcaacaaactaatccattacactttctaggcagctgaatttgttattcagttgcctttttatgtatttatccttgacttgaccaaaataacaagtaaaattatccatattagctttaaagctatattaatttagaaggtgagttggaattatgaatcttcacatttgtgaagtaacagcaaaaaattggcgttcagtagttgctttagacgtcgcaaaagatcagcaacaatttattgaaagtaacgcgttttctttagcagaatcattatatgaaggaaacggaacgtcagtaggtttatatgatggagaaacacttgtaggatacgcaatgtatggatggtattcagtaaaacataaaagtgtatggctcgatcgctttatgattgaccaacaatatcaaggaaaaggatacgcaaaacgtttccttcgcttactcattcaattcttacaagaaaaatttgaatgcaaaataatttacttaagtttacatccagacaacaaacttgcaatgggactgtatgaatcatttggtttccgcttaaatggggatattgatgatgaaggtccagttgtaggtgttgtaatggagttactaatagacgaaaatataagcctgtgaaaacaggctttttattatacatttatcaatttttagtttctctcccttatttaattctgttttgcaatctaatagaatgctcataaaaaataagcctgcaatttacgcagacttatttcacacactcctcgaaatgttcttggaaccactctttattaatatctcttccgataaaaactacttcacttactcgctcttcgccctcttgccactctctatcgtacgaagcagcaaataacgtatgtacaccttggaaaacgatacgtttatctactccatctatcgataaaattcctttgtaacgatataaatattcccctagctcttgaacgacagctgacatccactcattaagcttttgtaaatccagcggacgttcttcacgtaatacaaatgatttcacaccttctaagtggttatgttctttatgagggtaaatttgcaacgtatctttcattttaaacgtttggatttgtaataaagatggtatatctacctcacagttagtcgcctcaattaactttgcagtcgggttaattccttgaatttcatgcaagagattttctttctcattctcttcaattaaatctaatttatttactaaaacgacatcagcaaacgcaatttgctcttttgcttctaatcctttttcaaaatgtttatgtatatgataactatctactaccgttacaacaccgttaatttggtaagcagattgaatgactggatctaaaaagaatgtttgaataatcgggcctggatttgcaaggccagtcgtttcaattactaaaccatcaaaatccattttcccttccgcttttacgtccagtaactgttttaaagcaacgagtaaatcttcacgtacagtacagcataaacagccatttgtcatttccataatttcttcttccacattcataatcaactgattatcaatgccaatttgccctatttcatttacaatcaccgctaatttcttaccgtgattttctgataaaatacgatttaataatgtcgttttcccagatccaagaaaaccagttaatattgttactggaatcatttcgtacatctccttatagctatatgtttctacattatagcatatgaacactcccccacttaacaaagcttgaagtgggggtttctaacgtttcgacctaacggacgattaacgtcaggggagttaacacattagcgagctgtttcacgcctaacccctctatcccatttgtccatgcatttgggattacttttcgtaaaatgttagccgcagcatttacatctgcattaattaaagttttatttgctgaacgatatataccgcgctttattcgttttcctgaaaaagttgtattttggtcattttctccatacgttggaatgaagtcgttatccagaaaacttgctttcgatgtatatgattcttcagttacaacaacttgaatgcctacagcatttgctttgtatgtaatcatttgaatcagtaaattatgcgggatatgacaaaacgattggttatttctttttcccatattcgtttcttgtttccaacttttgttttgaccaataacgattttacaaacttcttcttcttgagctagttttacgatgtggtgactaactttatggaagacgtcttttattttcaagtaacgtttttgatgaagtttttctatccttttagaagtaaaaggtccttcattcgtttgttttccatttctaagaatgcttgtaaaatgactcttcattttgttgtaatattgatttatgcttttgacatgtttgcccttaacaaggacaggtttcatacctgtgtttgttacgatggttgcaaggttatcaatccctaaatcaatactcatataacgagcattctcttcaatcatttgttgttcagaaggaacatcaattaccaattccactacatattcattgtattttggaatcacacgaacttgtttcagtttaccttcagtgaaacctagtttcccaatatttaattgcaatttcgtctttggaaactttaaaaatctaccgtttttaatgatgcaatcttggtttgtatacagaatctctttttcagaagaacgaatatactttggaatcctaggcattccatcatatttgtttggattctttttatagtcttttaaactagcaaaaaaagatttccaattttggaacaaacctttcatgatggactggctacattgcgtaggcaaagctcgataatcattttgaatcatagccttaaatagtgcatctagaaagttgtaatctacataaggtttttcaaaattaggttctgaaaacaaattacatgtaatctctttctgttcttctttaggctttactttctctttttccaatttcttccgatagacaagacgttgtgtgtcattcatcttcccaatatttttatgaatattatccagaacttctttttgcaaaggctgcaactctttttcttgtgttaatccagtgtacacctggcgtatataaaagtttgtggtgttgtacatattcttagcgttatgacaacattcttgaaaataagaatacatacgatgccctttttttatccagatttgaagagttttatagtttgatggattttcttttgccattttattcacctccttgttaaggatattatagcaaaaaagaacatacgtttccgtttttttctcaaaaataaaatattcctttcaattcacctcaccaccttcatttacgtttagagatgggagtcctctcgaaaggcatgatagaaaaaatcgtttttatagcaaaacatatttattgtctgtacacctaattaactatataataacatgtagtaagaaagccttttcaaaacattattattcatcaagggggtacttataatggatcgagttcaaatggctgaaacgctagaattttctcgtattattcaaggattttggcgtttagcagaatggaatatgacgaaacaagaattactttctttcattgaagattgtatggatatgggaatcactacttttgatcacgctgatatttacggcgcatatacgtgtgaagggttatttggcgaagctttacaattaaagccttccttacgagaaaacatgcaaattattacaaagtgtggaatcgctcccccatcaccgaaatttccagagcgatatgttgctcactacaatactagtgcagagcatattatgcaaagtgtagaagcatcacttaaaaatttacatacagattatattgacgtattacttattcatcgtcccgatccttttatggatccaaatgaagtggcaaaagcattttcacaattaaaacaagaagggaaagttcgtcacttcggtgtatctaacttcttaccttcacaatttaatatgttaagttcgtacttagatttcccgcttattacgaaccagattgaagtttctgcattgcagcttgagcattttgaaaaagggacaattgatttatgccaagaaaaacgaatcaatccaatgatttggtcacctcttgctggtggggagatctttactggtcaatcagaacgcgccgtacgtgtacgtgaaactgtgcaaaaagttgctactgagctaggtgtttctagtatagatacggttatgtatgcttggttacttgctcatccagctaatatgataccaatcgttggctctggtaaattagatcgcgtaaaaactgccgctcttgctacaaaagttaacttagaccgtcaacaatggtttacaattttcgaaagctctaatggacatcctgtaccataatgcataaaaagaagagctgttttcttacagctcttctttttcatatgtatttctagtcatggcaaatacacacatatctcttaatccgtttccatctaccgcaacactcgcactttctaacgtaccttctaacttaaaacctaatttctcaggtatcgctctactcttcttattgaaagaatcacaacgaatttctacacgatttgcttttaattcagaaaaagcgtaatccgttatacctttcgcagcctctaccatatagccttttccgctaaaccttgtatcaatccaatatccgatttcaaattgaggtatatcccaattaatacgatgtaatccggctgaagcaataaattcacctgtttctttcgaaaatactagtaatcttaaatcctcacgttgcaaaaattgaatatgtgattttctaatactttcttctacttcttgctctgtttgctctttttgtgcaaacaccatccaaggttttagttcttgtattgaagcctgaattgcatcatatacaactttaccatctcctggtttcggcattcgaataaaaagtctgtcagtataaaattcagaaggaaaatcgaataataacggattcactgtaaacactccctatatttcttttatatataataatatccatctgaagttatatagtaaagaattttctgaattgaaaaccttttactcattcacttccaccgctacacgaattccagattcaatcgcaccttgaatccatccgtgatatagcgttgtatgatctccagcgaagaatattctcccctctggtttgacaatcgctggttgcagctcagattcttgacctgcttgaaaaagtgcaaatcctccaagcgcatacggatccaatgtccagctttttgaaattccagatatgaactcatcatacacttgaccacctaatattgttgctaagttgtgtaatgcgtaataaatacgatccccttttgataaaccatcccataacaacgcgtcataagaccatgtatagctacctaacatcatagccggtcctttctccccaattccataatttggataataggcataacgaattggcaaatctgttataattctgccacctaattgtccttgttcttcccaaaatcggcttttaaattgaattcctattttcgtcgcaggcatataatgtaattcacgaattgctttccatttttcatgagatatagaatcaaacggatctacttctacaaaacgcattgtcgaaaacggaatggtaacaataactaaatctcctgtaatactactatattcaaaagtttcctcgttccgatagaaagctgtcacaccattatcgtgttgatgtaacttcattaatttttgattatatataatattctcttctaattgcggtaaaaatgactttggcaatctatcattcccgcccacaatttcacaaaatccgctctcctcttgcataatgtatagaaagcgtaaagtctctacaaacgaccgttccaaaaaaccttctaaatctaataaaacaccaatcatctcaattgttactggcgaaaagtaagtattatactgataaggatgatactttaaaaattgtccagtagagtatctcccaaaatcctttacaacaatatcccaatttttttctgggttcttttttataaaatttataatgggctgtaccgctaacaataataattcctctgacgtttttccaacttcattcatttccacaggatatcttagaatacttggatctttttcatattgttttaacgtcgttttccgtccatttacgtatataatatccgtctcattcctattaataaaaggactcacctgtagcccaaattttcttatatatgccatcgttaatgtatgcgaatacggaattctcattgctccaacatctaaatataatccggtatcttccattctcactgtttctatacggccacctacccggttatttgcttcaaaaattttcacatcatgtcctgcagcctttaataaagatgctgaaactaacccagccataccagctcccactacaataatctgttttgggcttatcgtcttcttcaatcctttatctataacttttaacgcttcatccatttcagtgttatacattatatctttctgcacaattccaccccttacttcatcaaatggacgttagtggtttagtgcattttattcataaatccccataaacataacaccattgcaatttgaatattcactaaaagtacataagagacagatctcacttttctttatacttcgtataatatagcaactacaaagaaggagtggttaaaaatgaaacatacttatgactacgatgctacaaaaaaacatttagaattaaagaaacaaaacttatgtaaaaaacttagcaatatgacactatctgaaaaagaacgtgaacaactaaagcatgaaattgacaactatgaatatattttaaatctagtcgaaatgaatcattatgaacgcggattttctcgttaaaagcggaaataagattatccgcttttcattttgagcatttcactacgcatttttcataagtaaatatataataggatgtacattaagattgagaggtatattctatgatcaagttaagtgtattagaccaatcacctatttcagatggtagcacagcagcccaagctttttcacatacagttacgcttgcacaagaagttgaaaaactcggattcacacatttttgggtatccgaacatcataattccgtaagcttagctggttcaagtccagaaattcttatttctcatattgccgcaaaaacggaccgtattagagtcggttcaggtggtgttatgttaccgcattatagcccatataaagttgctgagaatttccgtgttctagaagcattgtatccgaaccgcatcgatctcggtgttggtagagcacctggtggtatgccaatagcaactcgcgcacttcaagaagggaaaatggtctcacttgatcaatatccagaacaaattgcagacgttgcaatgtacttacatgatcaagtaccagaaaaccatcactatgcaaacttaaaagccactccagttatcccaacgtctcctgaaatgtggatgctcggttctagcggagagagcgctaaaattgctgcaaacaacggagcttctttcgcatttgcacaatttattaacggcttcggaggccctgaagttatgagggcttaccaagaacaatatgagccttcatttttaggagataagcctaattcaatcgttgccatctttgttatatgcggagaaacaaatgaagaagcggaaaaaattgcttctagtttagatctatcaatcttattattagagcaaggaaaacgaactactggtacaccttctattgaaactgctcaaaattattcatacagcgcttatgatttattccgtataaaagaaaatcgtcaacgtatgattgttggtgatccgtcttctgtaaaagaaaaaataataaacttaagcaaagcatacaatactgacgaatttatgattgtcacgattactcatcaatttgaacataaattaaattcttatcgcttactagcaaatgcttttaatttataattctaaaaagagatgcatcacgtttaaaatgtaccctatagaatagacacttgaaaaaagtctattctatagggtatttgtccggttggtcctgttgctcctgttattcccgttactccgatcggtagagctgtgacgtactgtaaagctacatcgtctataagtactctggaactcccggcttgtccttctttataaataagtaaaatagctttatttgctaaaggtggagactgaggagtaattagatatatctctaaccaattactttgattgccattcggaagatgatttaatggaatacttataattaagccttgttccaaaaaaatagaattataataataagcaagcttaatagaaagcggaggacttggagcacccccaattttagcaagtgaaataagaaattcaaaactttcatttggaggtatagggattgcttgtatgagctgagcattagcttctcccccaattaagcttgcactatagatgcccgaatgactatttgtattaacaacttgcacgtttgttgtaatgaatggggcaagagtgccactttcaaagcctccattcattatcaagttagtaatcaaaaaatcacctctttaaaaaaataatttacaaataaaatcaacttctttatgaatttatatataaattaaaacttttataactaaaaatacatcattcttaaattttcctaacaaactattttgtagtttttatacaatcaatcacctcatttccctgatgtattaagagacaatattaaggaataatacatctgtatttattgtaatattatcttctatggttcaataagtaagagtgacaaaaagaagaagctaagaaatatttcttaacctcttctttttgtagattactttggtttatagtctgctttaaaaattacctaaagtaatctcatatcaaaatgttttgaatgtatacttacatttccgattttaaggatgttaggagaattggaatggagttactattttcgttattgtgaaagtaaactaatatttttaaatttacattagtgaacaaaaaagtacgaagtcaactaaaagacttcgtaccaacaacagactaaagtacagttcataggaaactgaaagggtatttcatctatttattataactcgcccattcatatttctaggaattaattattaaatatgcatagttccatatttaattgtctttataagtaaaaaaccaattcttctgtaataggattggtttttttgtatgtaatttagttattacagcaaccggaactcgtatttttaaatgtagtcttatcaatcttattataaaataataagtaaacataaaaagactccttatatataaggagtcttttaaaaggatacaatccctttaggtagatagtgatgggtatctattataacatatttttttataaaagatgagtaatacaaaattgtaattaaaattagttggttatggtacagcagttatattagcatgtatcattgttctttacatattaatatgtaagttaaattaataaattatataaattatataatttattaattttcatcattgatggaaataataaacctagttcattgaaaaacaacaatattacttttatacctaaataaataacgctagcatattataatccattttctctaattcatttggtatatattacaaattaaagtgcagcctaaaaaataaaaatgtagcatatagaagggtgatcgtgtgaattttatttggcaatctttaattttaattcttgctggaattcttttattaagaattgctggaagaaaatctatatctcaaatgactttagcacaaactgttgtcatgatttccattggtacgattattgtgcaacccatcgtagaaaaaagtactataaaggctgttactagtgcttttatatttgtagttacagttatacttttagagtattttcaattaaagtctaataccttcgaaaaatttattactggtaaatctaaagtggtcattgaagatggtagacttaatattgaaaatttaactaaattacgtttgacagttgatcagttagaaatgcgtttacgtaatcaagggatttctaaaattgcagatgtaaaaacagcgacacttgagcctaatggtcaattaggttatgaattaaaggatgaggcaaaacctttaacggtaagagattttcacaaaataatgcaatcatataatcagtctctagacgatgtacataatgaacagagagaaagtaataatatatttcaagaagtaaaaaacacaagcaaaaataaaaataaccatagtcataaagaacttaaataaaaatggttctaacataccttacttaaaggatgaaaaatacaatcttaatggggtattcctagcttgatggtgatggggtagcgtcaggaaaatgcggatttacaatgttaaggaaattcccatattaaaaagccaaatttctcaatatttatattgaaaaatttggcttttttcattactttgtaaaagctccctttaattgaataactaaacaaatttaaacgcacctatttgtataagtaaaattattcgcaaactcttcgttgttttttggttcgctatttatctataacaatcgataatttatagtttgcatattcgtttaattctttcagaaattgattcattaattctatggatggaaatttacattcgagaaggtaacaaccatctccactgattttataattatttattaaatatttgtcttgcgtttttatgaatgacaaataaggttgatgaaaaatgctttctgtaatgattgtaataaaagcatgtatataacagcctaatttgactcgattaactttaattgtataaccctcaataactccttgatcttctaatttcgccactctagctgaaacagctggtccagtcaaatggactttctcacctaattctttcatcgtgaaccgactgttcttggatagttcatctaagatacgtttgtccgtattatctaacatttatataactcctttcattaataaagtaaaacgaccaaaagactttatttaatctgtgtatccattattgggaataatataaactatacattgttcaaagaaaatctcaaaaaaaaggagttaataaatatgaatatacatcaaattcgtaatgcaacaatcgttgtagaatatgcagggaaaaggtttttaatagatccaatgttagcagagaaaggaacttacccacctttcccaaattcaccaagacaagatcaaaataatcctttagttagcttaccagtacccgttgaaaatattattaataatatagatgcagtcatcgtaactcacttacatttagaccactttgacgaggcggctcaaagaatattgccaaaagacattaaactatttgtccaaaatgaagaagatgcgacagaagtaagaaacgccggtttcaaaaatgtagaggttttacaggaagatacagtctttgaagggatccaactacttaagacaaaaggcgaacacggtagaggtgaaatactaaaacttgctggtttagtatgcggtatagtcttcaaacatcaaagcgaaaaaatgttatatgtagccggagatacggtatggtatgacgaggttcaaaaaattctcgatacacataaaccagaaatcattgtcgtaaatggtggagataatcaattctttgaaggcggttctcttatcatggataaagaagatatctacgaggtgtacaaagctgcacctaattcccaaatcattgtagtccatatggaagcagtgaaccattggaacttatcaagagaagaattaaaaagctttattagcgaaaaaggaatcacttcgaccgtttcagtaccagatgatggccaatcatacacgttttaaatccaattttcgttttgaggaacagccaatttcttaagttgatgggcatggggtatcgccaatcgaataacataaaacctaagctaaataaaaaacaatttcctagtaacaggaaattgttttttatttagcttttaaatcgtagttggtaatattttattatataattagtaaaaaataagatgaaatagctaaaataactgcaataactaagagtgataaccatacaattaatgtggtatgtgctcggaatgttttgacgtttaattagatattgtaaggttgcaataataatacttattccagcaataacggatccaattcctattccaatagcaatcttattatttaatgaggaaagctcttttcgaacagctaaatgaaaattagctacaagaaatcccaaaccagcaatagcaattgcagtacgtaaccaagctagataggttctttcattagctaaatgctgctgaatatattttgaatctactgtttcaagggcttttgacttcactttgtgttgctccattacatcgactcactccattaatcagcagtatagtgtagatgtgcatatccttttttacgtctataccacacaataagaatactacaaagtacgcacccaattgagactaattgagctattcttatatgggatgttaacatgagactatccgtacgtaagctttctacaaaaaatcttcctacagaataccataataaataagtgaggaaaatttctcctcgtttcaaatcaacttttcttaatacgagtaatactatcacacctgtaatattccagacagactcgtataaaaaagttggatgataatatgtaccatttatattcatttgattgataataaaatctggtaaatgtaacgactctaaaaagcttttagatacaattcctccatgagcttcttgattcataaagtttccccaacgcccaattgcttgcccaaaaagtaagcttggagctaaaatatcagcgattttccaaaaagaaaggtttcgttttcttgtaaaccatatagttgttagtacagctcctataataccgccatgaattgcaattccaccatgccaaattgcaaaaatttcaactggattttccttataataattccattcaaagattacataatatattcgtgctgaaataattgagataggtaaagctaaaaagattaagtcgtaaaatacatctgaagatattctgcgttttttcccttcacgagtagctaagataaaccctaatatagctcctataccaataataactccataccaatgtacagcaatgggccctaggtgaattgcaataggatctaagggtttaatttgttctatcattgaaaaatgccccccttttatttaaaatgtttaacaatatatacattttagattatttttattataacattgaaccttatcaacatataaaccaccttttctattatccgtattaaattacaaatgatattatgagagcattaattatcgttacatcgtaacaaaaacgaccatttttgttacggttattattaataaacttttagtctaatgaacttgcatactgagtgtaacaaaaatatgtaacaatattatttgtaacaatatctccatttaatcgtttttggtacaatagtcggtgaaggggatgataaatatgaagtttggttatatgcgtgtttctacattagatcaaaatttagatcgtcaaaagaaacagcttgaagaatttgaatgcgaccgtattttcttcgaaaaagtaaccggtacaaaacgaaaccggccggaattaaatagtatgctggaatttcttcgtccagaagatacagtcgttgtaaccgatttaactcgattatcacgttctacaaaagatctcattgaaattacggaacgaatttctcaaaaaggagcacacttgaaaagtctaaaggaatcatggctcgatacaacaacagcacatgggaaaatgttgtttactattttcgctggtattgctcaatttgaacgagatttaacttctgaacggacaaaagaagggattgaggctgcaaggaaacgagggaaacatcctggaagaccaaaaaccgatgaggaaaaggtagattacgctttatatcttattaatcaaggtatgagccgtacagatgccgccgagaaagctggtatctcgagaatgactttgtaccgtaagatgcaacagtaaaatacatatagttttgattttagtatagtaggaggaattacattgacctcaattgaacgtacagcctatccaaggtttaaacgaaacttaactcgaaaagagctgaaagagatttataccgtcacatatgaggagaaccaatttgcccatagagtagcacgtggaactattccggtctttagccttttagttatgctaaagtctttccaacgactaggttattttccacgtccaaaagatattccatctgtgataattcatcatatccgttcgagtttgcgtatatcaaatgaaaccgaaccaaacttccgaacaaagtccatatatcgacaccagaaagcaattcgtgagcatttgcaagtattgccctttgggaaggatgctttacatattgctactaatgccatatataaagcatctcaagtgatggataaccccgctgaccttattaatgtttctattgaagaattaattaaggaacgttatgaattaccagcattcagtacactagatcggcttgcacgtcgagtgagaacgctggttaataatcgtctttgtaatacaattctcgcccgtttgtctaatatagaaaaagataaactcgatcaattacttcatacgtcaaaagaaactcaacattctggttataattattttaaagaagttcccaaaagcccttctattactcatatgaaagatttacaaaacagactttcatttattacgtctttccttccaaacattcatgatttattagaaggcattccaatttctaaattgaagcactttgctgctgaagcgaattctttagatgcttcagaaataaaggacttcgctcctcacaaaagatatatgctgttgttatcaactatttatcggtcacaaattacaactagggataaccttgtagaaatgtttctaaaaaggatgggaatcattcataaaaaaggaaaagaagaacttgctcttttgagggagcaacatcgttccataagtgaaaatcttatttctgtactgagtgaagttttagaaacaacagctatgcatgatgataatacacaaattggcagcaaaattactgagctatttgaagctaaaggtggtatagaatttttaaaacaggactgtacagcaatatcctcatacaacggaaataattatctaccacttttagaaaaattctataagaatcatagaaaaacattatttcggctcatcacattattagaaattgactcaacaactcaagacgattccctcataaatgccctggaatttttattagagaacgaaaaccgtaaggttgaacatctacctagtgatattgatttatcattcgccagtgaacagtggaaacatacaattcgcgttgaaaaaagcacaaatttactttaccgtaaacgtcttgaaatctgtatattttcttatttagcctctgaattaaagacgggagaccttagtgtaaaaggttctgagaaatatgctgattatagacaacaattacttccatgggaagaatgccaaccgatggttgaagattattgtaatgaactagaattaccttcctcacctactgattttgttaatcggttaaaaatttggctaacatccgctgcaaaaactgttgacctaaactatcctaataatggacaagttatcataactgaagatggagaaccaatcctgaaacgtttggtacgaaaagagtcttccaagagtagtaaaatgttagaaaaagaaattatacaacgactaccggaacgaacgattcttgatatactttgtaacgttgaacactggactcattgtacaagacatttcggcccattttcaggatctgaacctaaattagagcatccaattgaacgttatattattacttcatttggatatggctgtaatttagggccagcccaaaccgctaaacatatgcgaaatatagtaacacctcatatgatttcttttgtgaatcgtagacatatcagtgtccaaaaattagatgcctcaattcaagacattttaaatcaatacaacctctttagccttccaaaactatgggggagtggaaaaacagccgccgctgatggaacaaaatacgatttatatgaagaaaacttactgtcagaataccacatcagatatgggggctatggaggaatagcttatcatcatgtttcggataattatattgctttatttagccattttatcccctgtggggtttgggaagctgtttatattattgatggattgctaaaaaataagtcagatatccaacctgatacgattcatgctgatacacaaggccagtctactcctgtctttgcactttcttatctattaggaatcaatttaatgcctagaattaggaattggaaagacttaaaattctttagaccaagcaaacatattcaatataaacatatagatcctttatttagtgatgtaatcgattggaagttaattgagactcattggcaagatttatttcaagttgttttgtctataaaagctggaaagatactaccctcaacacttctcagaaaactgagaagtgatagtaaaaagaatcgactgtaccaagcatttcgagagctaggcagagtcattcgaacgatatttcttcttaaatatatctcagatatgaaattgagagagcaaattacagctagtacaaataaagtggaagcatataatggtttttcaaagtggttattctttggtggggatgggattattactgaaaatgatccagtagaacaagaaaaacgtattaaatataatgatctcgttgccaatgcagtcatttttcaaaatgtcgttgatattaccatgattttatggcaactcaaaagagaaggttatcgattctcacgagaagatctggtgatgttaagtccatatatgacgaaacatataaaacgatttggcgattatgtgattgatttacaaaacattccacaaccaatagaagagaatatacctgtataaaagataatagggtcataacatggaaataaaaaccagtctatgacccatttttacacgtatctcggctgaacccctaattgtgccgctgttaaacgatgaaaaacaagacgtgaaaataactgctgtttatctccaatataagcttgctgatattctatcgtttctcctggttggagttgattcaaaatctgtatgacgttgatttttatgtattctgattgttttttaatggaaccatttttaaaatattccggatctggattttttacatatacatttgtatttaactttaaccgcgaaatataatacgtaccccgttgatccatttgatctaaatcctctaatgggtgtttttgcccatcccctcgaaaagggggaataagaaaaaataggatgtttttaaaaaatgcacctccaattgttagttatgtgtctaacaattggggtgcacttcaaaattgatagtctttagtcgtcgctacgctgcataccagtatacattaatacgagacgtaataattcaaataccgctacagctgcagctgctacatatgttaatgctgccgcatttaatactttacgagcttgcccatattcatctgttgatacaatacctaacgcttcaatttgttgcattgcgcgctttgacgcatcaaactcaactggcaatgtaacgagctggaacacaacacctgctgccattaaaatgatacctaataacaacaaaccagacatttgtgcaaatataccgattaggacgaaaatccaagacatattcgaaccaaagtttgcaactggcactaacgaatgacgaacgcgcataaatttataatcttttgcatcttgaattgcgtgtcctacttcgtgtgctgcaactgctgtaccagcaactgaatgtccataatagttatctgttgataatcgaaccgtcttagcggttggatcataatggtctgataaatgacctggtgtttcttctacagctacgttgtataatccattttcatctaaaatttttcgagccacttccgctcctgtcatacctgatgttgaataaacttgtgaatacttgctataggcactacgtactcttgactgtgcatacaacggtatgatcattatgatcgcgaagtaaattaaataaaacatcatgaacctccattgaagttttaattatagtacttctcattctattttcttctgccactattgtcaatgaataaaccttacaatccatatctttatttattgcattatctatttttagaatgtacattactttttcttttttctctttctcctttatactttctccatccaacataagttaatgtgaagaaaataagtcccccagtaattgtcataaaccaaatgagagagggtgcaatttcatctttttttactgtgtgaaatatcttttgcaaatcccctttaataatccctaattgcatttggccgcctttcgtttttaacataacgttacgaaattcatctaaataagataaatgaacatttacacgctgaacctcgttttctggcaaagcaatcattaagcttggataaataatattgaattcatttaaaaacgtatttaacgtttgttgaaactgcccagcatcttctttttccatcgctttttccatttgagaaaaggcatccattactttcctttctctttccatccaaagtggttgatatttcgatacttgtgcatcaacagcaagttgtaatgccagcacattatcaattttagcttgcttacctaaaccttcttcagagagcgattgttgcgccttatcgtaagctaaagaaataactctaacttgatctggtgttacttcctgcttcttttcattcccctttattaaaaattgctccgagaaatgttgtaatacttgtaccgctttttcatcttcattacgcttcactaactgtaacgagtcgtctaacaaccctgttagctcattccactcttcagcatatatacgtaacggaaacattataattagaaatgctatcaatccaattaatgttctcttcatcccggtcccccctataactactagtacaaaatatgttaatttggacaagaatagaacagaactagaccgaaaaatatattatcattttacaaagaaaaaaattctctttaagcagagaattttttctgtgacatccttttcttttttacgaaatatcgatataaactgtaacaaagtatactaccacctaaaatgaataataaaatagcacacgcagcatgcataaagaactcttctggtaacattaatataattggatctttttcaggatcaaaaacccaataatcattactaaataaaagtttatggaataatacaaaactcttttcaaaattaatagcaatcggtaacataagcgctatcggaaaaatgattgttaaaatcgatccgtgcagtaaaaacttttcatttttcttttttaataaataaattccgcctatcactgcaatcataattgtcgcatacatcacatattgaatctttactaaaatatttttaacatctacaaaatgaatacggccatttgtggacatatctaatgttggcaaatgtaatgctccgtcataaaacggggataaatatgtaataagcacatcgtaatttcttttaatttcatccttcgtcatatccgctaaatcaggaatatttaaaaaatcaatttcaaaataatacagccattttccatagacaactgccgttgttgcgagtgcaaaaatagaaaatgctatgctatatgaaacaactaaagtaatcaatcgatccaatatttttgtaccactcttatttttctccatgttctccccctaaatgttctaaccatcataaagaaaattgtttcctttgctcacgtaagcaacaataatatgtaatacatagtacagcaatacttaaccaaaacgtaaaataaccaatttcctctacaaacaaatgcataattccatatcgcggcatttgccaaaataaataatcaattgcatcgttatgcaacgtccacacagctgctactataaaatgccatttttttatacgatagaatggagcatataaaaatccttgtactgccatcgcaaagtgcgaaagcattaacatgtagcccataaggccaataggcccttttacgtaaatcataatcccgtttacaacaacagcccaaataccatattttattaaagttacaatcgctaacgcttctattaatccccagtttctctttgccaaaaaagcaattaaaacaaagacaaaaaagagactcgccataggactatctggtacaaacggccaaaatataggtgacgtttctttcaattgatttccgtaccatataaatccgtaaattgtacctaatatgttaacaattaataaaaataataataccgagcgttgtcttaacattgcatacaagtacaccaatccgtatgtccaacacctttcaagcaaagtaattcattcattaaatcctactctattataacaaacttcatccaactaaatagaaaagctgactacaaattttgtagtcagctttttattattttttattatactttgcaacgaattccgaaagcttcttcagttcctcatccgtacctttaaatacacctttaggcattgaaccttttccctctttcgcaattttagcaatttcttctggctttaaagttaagttttgcagtgccggtgctgctgccccgccttgtaaattgtcaccatgacatgttaaacaagtatttttttgcattaatttatagccatcatcatttttatcaactggcgctgtttttacaattgctccttgtttttttgcagcttcccagtcgtggtgtgctacagattcccaagttaaaaagataatcgatgcaattgctaaaagcataaatccagttgccacaggacgcttcaatggacgtctttctggacctcgatcaagaaatggagctaacagtaatgctccaaacgcaatccctggcataataaatgctccaattacagtaaatgaaccggaagcatacgaatactttaataactgatacaagaataagaaataccaatctggaagtggtatatatccagcatctgttgggtccgccattctctcaagcggcgacggatgcgccactgttaaacataaataaccgattaaaaaaactgcaccaaccatccattcttttaacaagaagttcggccaaaatgcttctgttttccctgggtattcagaatagtcttttggaatatttggtttccgagctactggtacccgagaatctcctacaaacttcatccctttgccgcgatgcataatctccctcctttagttctttcccctttaatttagcaatctcttatagtggaccggaaataccttgtttgcgaatcatgatgaagtggaaggccattaaacctagaagtgctgctggtaagaagaagacgtgaatagcaaagaagcgagttaatgtttgagcgccaacaatttcggaatgaccagcgagtaatgttttaatataaggaccaatgagcggtgtttgctctgcaatttgaatccctacttttgtagcaaataaagctttcatatcccacggcaataaatatccggtaaaaccaagacctaacataacaaagaaaataagaacaccaacaatccagtttaactcacggggctttttatacgcaccttggaagaaaactctgagtgtatgtaaaaacatcattacaattacgagactagcaccccagtggtgcataccacgaacaatttgcccataagcaacttcattttgtaaatagtaaactgattcccaagcatttttaatatcaggcacataatacatcgtcaaaaacattccagataaaatttgaattacagtaacgaaaaaggtaagtcctccaaagcaatagacgaatgcagaaaagtgatgtgccgggtttacatgttcaggtacttcatgatcagcgatatcacgccatattggtgtaatatccaatctttcatccacccaatcataaattttatttaacatctactttgcaccccctcttggcttcgcttttcctagatacagcgttccatctttcactttagactcgtacacatcaagcggagcaaggggtggcgtacctttaatgttaatcccatcttttgtataacgccccccgtgacatgggcaaaagaattgattcggatgtgctttgtccgaattccagttaactgtacatcctaaatgtttacatactggagagaacgcaacaatgtctccgctttcatctttatgaacccaagccgattttggttcttcagacttgtaccaaccatcaacctgcttcactttaaaatcgaaacgcttcggctctgttgtaatatcctttacttgcgcaacagcaaccatatctgttcccgcttcttttcttaacaccggatcaagcgcaaatcgcgtcatcggcattaaaataccggcagccataaagcctcctacccctgtgagtgtgtaatttaaaaattgtcttcttgacacgcgatgttctttgtcgctcacgaaaatttcccccctctatcagaaattgtcccctcgtgataaattatataaaaaataaaaactaggacactatcatgatataatacgctcatgcacaggtcaatatcatactactcataataataagaactttctgtttattgcgagtttccccatttctcttccaacatcaccattatattttttatatgcgcatgaataacttctctttttgcttgatcactaaattgttctaacgctaatgaaggaaaccaaaataaatctccctgtaactcttgcatatcctctttccatgaaaaatcacttgtaacataagcaatatgcttaaaaccttcacttcgtaaatgatttgtccattcttgcaaacgacctttttcattcttttgactttctaccaaatacgtaaacgcaggcagtaaaagcactcttcctttatactctctttccaattccgtgctcaacaattcgataaattcaccttgttctacaaccattttcatttcttttgctgccgaaattgataacagcggtattactcctgtatcaacatactctcttgcttgctcaaactgttctacatcttttacaatccacttcaaatcccttccctccttcacttgcaaatgacagaactttcactttatatatattaaaccacactaaaagaggtaaaaaaagaaaaactacccaatataggtagtttttctttataaaagtctgaaatttgtaaaaattaattaatccaaataaattctataaagtctttaactctgccgttaatctatgaaacgcttccttatcttgcttatctaacgcttcatcaatttgtttcaaaaggcgttctctcctaaacgaaaatacactttcttccaaaaacctttctgcaagtaaacgatctttttcatttacttcaatatgctttggtagatatgggttttcttctaatacagctacataattcgcattttgaaacgatgatttaaagttgagttgaatataaatatcctcatctcgatttaaacgaatatcatgaaacgatttttcagcatctgttgtcataacattttgtttaaaaaagtgaaacggtgtgtctttcacacaattcgctgacatcactaagccacgcggacaatattttgcatgctctacgaagtggactttatgcatcaattggtcgtgactcattaaataattcagaatccatacacattcacgctgtttcagttggtaattattcaaaaaccattttacaaaatccttcttctcgtttacagaaacaggggtattcatagcaattaagtccctcctctgtctttctcttttctttttagattcaagaagcggcattcagtttccttccaacttatgaaaaatcctctaaattatataacaattcttcaatatgaatttgtgtcgggtctagttgtaataactgggtaaatacttctttcgcctcttttcgttttccttcttccaataagaaataaccgtactcttctaagaagtctggatgattcttaaaagaagtatatgcactttcatagtgttttaatgcatccgaatacatttctaattgtttttttgcatacgcaagatcccaaagtagttgtgtatctggttctccactatcaatagcacgctctacaattgcaattaactcttcgtacttttcttgtccttttaagatatatgcatattttaatgttgcacctaaatgccctggatctaactcaagcgctttttgaagaacttcctctgcttctactattttccctaatttcgccgcaatgttcgctaactctacataaaatggaactgaaagctcatctactttaattccttcatgaagcgtttcatagctttcttgaagcattccttctttttcatagcttttcgctaaatacatgtacagtgatgcgtactcagggtctaattcttttagttcttgccaagcaccaattgctctctgatattcttcaccttggtataatgtaaaggcatatccaaataatgagtgaatatctttttgttcctctaggcctgcttcataataagaaatcgcttcttcccagtttccgatcgcgcttaacgtttctgcgaggcgaagtgcgatcacaacaccacccattactttatgttccgctaatagcgattcataataagtaattgccttttgttcttcacctttactactatataattctgctaacccaaacgtaataacaggttcatcaggcatcatttctttcgcctttaatagtttttgctctgctacatcatcaaaaccttgcatttggaataaatctgcaacaagtaataacgattgaacatataaatcgtcattttctggaatatcatgaagcacttcaatcgcttcatcttctttatctagatcaatatataattctgctaaaaatacagtgaattcactttcttctggatacagtaaacgtaagtcttcagtaattgctaatgcctcatctgtaaatccaagcgtatgatagtaacgagcgatatcatacttctcttcatcattcgcaatttttaattgttcttttaataattgtaatcctttttccgcttcaccattttcaatatatgaaacagcttgttcaaacttttgcataaacgtctcctttaattctaaaaaatattctcttctgttcatttatcataagcaactcactgttagaacgcaacctttagaatgagcatacttcttcttatacttcttcttacagagtagttaattgttcaaaaggttcggatatgacaccgataccttaccatcatcttctattgtaccgctttcttttatgaccgtgcaaataacttctctcactaattatcgagccatacaaaccgtggtttacagaataacttaattagcagtcttcaacctttattttgaatgcgataaaaaaggctcctatactaggagccttcacaatctcttaagaatatgtttcttctttctgtacttgctcatttacaagctctttcagcaactctataatttcatcattttcttccttcaaaccgacagtaatacgaataccatcatcgataccaaatgcagcaccagaacgaacgatatatccttttttcattaatcgttcgaaagcttcattacccggtataccaagttttaagaaaatgaaatttgtttgggatggataatagaatacgttatattctttacaaaatgcataatactgatttaaaccttcagcattcttttgcacacaatcttgtaaaaaggcttgatcttctaatgcagcgagtgctacagattgggctacagttgatgtattgaatggtaacctagctacttctagctgtccgtttaacttcgcatccccaatcgcatatccgatacgaaaagcagctaaaccatatgcttttgaaaacgtgcgtaaaaccataagattttcatacttttcaagaagtggtaatgtttgcggatagtcttctgcttccgcgtattcataatatgcttcgtccataataacgagagccgacttaggaactgattctaaaaatgaaagtaatttttgtttctcaacatatgtacctgttggattattcggattacaaatccagacaattttcgttttctcatctacttgctctagcattgcatctaaatcgtgaataccatctttaagtgatacttcacgaacttctgctccttcaataacagcatggtgatgatattgtgaaaacgtaggattcgccattacaacgtttgttccttcatgtagtaacgctcggctaatcatttgaatgacttcatctaatccactaccaaatagtagttgttctgcttttacacctaaatgttccgctacttttgtccgaagttcaaaggcatatccatctggataaagggcatattggctcgctaaagaagttaatgcttctgtcacacgtgctgaacaaccgaatggattttcgttggatgctaatttcacaatttttgataaaccatattctctttttacttcttcaatgtttttcccaggcacatacgctctcaaagttaacaattgctctttcactctcatttttcttcccccagtcatttcattcaatttgattacaatacggttatagccccatgcccatcaacttaagaatttgcactacccccaagtgtcaaaaaacgttattcgaataacgttttttgacacttgggggtagtgcaaattcttaagttgatgggcatgtgaggaaggggtcttcttggctaaaatgataaaaaaagacaaactctccaatgtgaggagtttgtccaaaaccatgatttctttagtttaacaatatagaattcagttccgataagaatctttcttttttccatatcccacggtttttgcatcgatactaacaatagtggattagaataatgacttaatacttgctaggacagtaagaatacctataataatgacaaatacattgctagatttccctttgtatttagcaagtactgatactttatggattgcatacattggtagtatacataagatagcagcaactagcggaccgctaagggcatcaatgattccaagaatacttggatttgtataagcaacataccagcatgttaatacgacaaaagtaagaatcattgtcttaactgttttttctcctatatctttcccacgttttttactggacttgataatcatgtcacgcattacctcatacgctcctatataatgaccaaggaaagactttgtaatagccacaaatgcaatgataggagctgcaatagtgattactggcgaattaagctcattagcaagatatgataggattgacaagttctgttcttttgccaccttaagatcatttggagtcaaacttaaggtactgctccaaacaaagaacataacaactacgaatgtcataatataacaaactttttgtatttgagcacatttagcatcagtagcatctattccatacgtagctctctgtttcataacaaatgacgaaatcataggcgaatgattaaacgagaatactatgattggaagtatcatccatatcgttcctaaatatcccgttcctgttgaagcagtagaaacagctgaaaaactaagcattgacgtattccactgtggaatcaaagatattgcgataaaaagtagagaagctataaaaggatacactagcatgctcatgatctttacagttatatcttgaccaaaatttagtatagcgataagaccgagtactaaaacaagcgataaaatggaccttggaggctccgacatgtgcaattgatgcacgataaagctactagcggtatttgtaagtgcgaccgagtacatcagcacgatcgtataaatggagacaaaatatacaatattaaaaatgatacttgccttatttccaaaatactctcttattgtacctgtaatcccctcatcggcagagttcgaagcgtaaatcattttagcaagcgccctatgtgaataatacataacaggatatgcaagtatggtaattaacagcaatgataataaaccacctgaacctgcattaatcggtaaaaagagtactcctgctccaattgctgttccaaaaaggctcaatgcccaggtagtatcctgtttatgccactttttagggtctagatatttctcattttttactgcagtgttatcagcttgaaattctatgttttttgcagtattcccatccatataataattcctccttgtgtcctattcttaattctctttttaagatataggaatatagaccgttcttgaaaaatgaatagcttatatagtgccccacaacgaatatcccccttctaggttaataaaaatcaaaaaattagcgaagcatcaacctgaagggtttgttaccacttataaaatattttaattatatagtagtatattttattgataacttccccaatatacagacatccttaggcgaacaatagagtaaagattgttaaaaacttcacaatatattcgataacttattgatttgattgtttctccccaaagattttatttttaatggaaattcctgtaggtgtagctgcaataccacctaaacctgtctctcttaattcgcgaggcatctgtcttccaactctatacatggcttcaatcacttcgtcagcattgatgagattgtttacgccagctaatgcgatgtccgctgctgctaaagcatttgccgttccaatggcgtttctctttacacaaggaatttctaccaaaccagcgaccggatcacaaactaaaccgagtaaattttgtaatgcaatcgaaaaagcttcagaagattgctgtggcgttccacccgcagcttctgccgcagctgcagccgccatcgctgaggcacttcctacttcagcttgacatcctccatacgctcctgaaatacaagcgttgtttgcgactatcgttccaaataacgctgaagtgaatagaaaatgaatcatatcttcatgacttaactgcaacgtatctttaatactaaataggactcccggaatcgtcccactcgcacctgctgttggagttgcacaaatagctcctaatgcagcatttacttcattaacaccgatagcactttgaatccctaacaccatcaaatctccagaaagagttttcctattttctcgatagtttttaatttttacagcatcccctccggtcaaacctgttggagaaaatacaccgtcgccctcgatacttttatttattgcatgttgcatagtcgctaaatttcgttccattttactccatacttcttcataagaagttttagtttgtttgatttcctgttcgattgctaattcataaatttgcttttggcttttattagctgcatccacaatttcttttatggccatatacatatttttcactccttaatgtgactaaagaataataagattagctatattgcttaaatctcctaattccttctgagcattacctggcaatatcgaatccaaagcgaatgcatataaatattttgttttatcttccaaactatgaaagttgttaatttccacatcatattgtttaaagatcctgcgtaaaacaaattcaaagtcagctctttctgaaatcgcaataacaactggcaatggcccctgcagatttaagctaaatccatcaatttcaacatttttgacttcaatcaacccaccaccgaccgaaacacccattactctaatacttcgactttcatcctctgcatatacatctgccgtatttggatgaccagcaggactattacccaattgttcaataaaggtaatgtcaattcccttagactctgctattttaatagcatctggcactttgctgtcatcagcagctaagcctaatataccagcaataattgcaaaatcagttccgtgacctttatgggtttcagcaaatgattcataatactttaccacaacttttttaggaagaccttgaaataatttattagcaactgttccaatagccaaagcacctgcagtatgtgaacttgaagggcctatcattatgggcccaatcacatcaaaacaacttttgtatttaacaatctttttttctttaatagatgctacattcatgttcatataagcacccccataatttattatttttagctgtagttgaatctaagttattagaatgatcgattcaaaacaagttttgtttgataacgctttctttattgagttgaataaacttcccttctaatccgctatcctccgtatagtaatcatatcagtatgtccaattttaaaaaattactggcaagttctttagaatttttaatccaaaacgaggtttgatattttctctagaggtaataaattgtgtctcgacgccctcattataacttgtatatttataagtttaatctttttttattttcagaaagattgaatagacagaattttgaataggtaataaattacacttagtatgtagcaattgtgtcctttgtttgaagctgtattagttagtaaaaaagcaaaaataacacagagttcctttcataaacacattgattatattgaaaaatcattataaagatacttatattgtcttttgtttgaacatcttattttgaacgggaaacctgttgcaataaataattcattcatatgaaaaggaatacattataaaatttaaaaacgtttcagtatattaattatacattttgtataaatattaattatcaaaaaaaactaacttcttattaggatcttaacataaaggatacattccaaataacaatggaaattctgctttatcaatttctttatacgttatatttccctctttacctgcaacagcaacttgtactttttcatttgttttcacatcctctgcacctattgcaccacccgccaataatcctgtacttaacagactatcgtgaacgaaagttagagagttatggaacaaaatataatgtgtatgtacatacatttcttttaaaagaagttttgtagtatgcaactgaattaaaaaaatatagatttttatgactctttttaggggatatagcaaagtgggatcttttatatgcacattgctataccgaactagatttcagtatagtatttttttgcaactcattgatttttaccaaacacgtataaaaaccaacaatatgaaaataaacgactggctaaaattttactttcaataaaataaaaaagaacctgcaaatttgcagattctcctgataatgatttatatgagtaagactcggaaatataatacaatgattcaaaaataagttcaagtaaattcaaagaacccgctggagttcgagttctttcagaagtgatgatgttttctaggcttagcaaagtgagaaaatacaagaatataatacatcgagatttagagaatttcaatatttaaattagaggttattttaatgtgatgtaacatcagcattttgaaggaatagcaatgaataccttatacattcccagtctacataacgctttattatcagtagaaagaaaaaggaaaatccctactttcacaataaatccgccttgctactctattcattttttgatacattcctatccaccgttttaggcttctcttttgtactgtgttagccgaaaaattgtataaatcataattcgtttttcttccacctgtttcaccctttttacaccctagttttacaaaataagaagtcatcaaaacttatatttattactttctgttatctcctctctcttgttctatgcatagtctatctaaatttttattagctactaaaaaaaaatttacaggacgattaaaaaaagccaagtgcattgcactcggctttatggtcgattaaacaattttacttcagacgtattaaactgatgtagatagtctttagtagaagtataacctgaattcatgagtgttttcttttcttcttctgtgatatcaaaattaaacgacgacgtaaagaatgtattaataaatacagtgcgggcagcatcttctttggtggtttttccgctctcatgacctttaatcatggtttgagacaaattccatgcaaaatgaataagagaatggccaatatgatgttctgttgaagttgcgatatgttttaacatggcaacctccgcctgagattctaaacggaaaccaagtgtttctttgttgtagacaatttcatctgtaggatcaaagaaagatgcattgtatttcgtgtgtaagcttcttagtgtagaatgatcctctatattgcttatcagtttattaacctcgtcaatcgtatctgtggtcgtgaagtgttcttctttattcacaaaacttttccgatcaaataaacgaattgggtagttatcgagtacacctccgtctacataataatctttatcccattccacagatttaaaaaagaatgggatggacatcgaaatccgcacagcaactactaacgggacatcaggtgtcgtttcgcgagaaaacgtacgaagttggtgtgtagaaacgttcgttccttgaaaaaacacgtcttttcctgttttgtcatacaactgctgaaaagttgtgtccttactccctgtccacttttcaacgatctttcctacccactcagtgaagaaatcccctttatagataccaaaaccatcaaaaaacaaacgaatgttatcttgtacaatcgaaaaatcatcatctttaaacgctttgaaattcatgtctttgtggattttcacaagatctgcgaatggaatggaaagacctaaaagtaatgcagtaatcgctccagctgaagtccccccaaatcgttgtatttctggtaaaatcccttcttcatttagtgcacggatagcacctatataagcgcttccctttaccccgccaccttcaaatactaagttacgaaatggatatgccattatatacctccaatcaagaaattttcgatctgttatagtatcggaagtatattgaaatatattccaaatggtattaagaaagtttcatgtcctccgatacgtatggccgaattatctttattcaatggataaattgtttgaaagggaagaaatttgcttgaaatggtaatttagttggataggaaacaggaaacggagcgcatctttggatgcactgaataatatccccttttgaaatcgtatataacgtaacttcttttccgatgcattctccaagtaaaatcacgagtaagaaatcaaggaacaatctacatttcataaatccctcactctctttaacatacaatccagtgaaataatttgtttcaaatacgtagaaatatggtttaaccagcaatcaatgatcaggtcttcttaccctaagtaaacctaaatctgtttgtctccatacagaaagtgataaatagttttgtttctattcaaatagtacaatatatgcaaaattacatatctaattaattgcttttaatgttatattttaatagcgatgaatgctattatttcataagttgtcaacaagcgttatgtatgtatgagaaaaaggaaggagccaaataggccccttcctttttctactaattaactaaattactctctggtaaaaatttaaatagtaatgctcatttatagacgtctgattatgcattaaacatgctagctttgcttgctgtcggaaaaattaaagacgatagtcaaatatgtcctttcattactttatattgaaataaataatgattcaaagttattttgtgaaaattacacaaaaaataccaattcgtcgtttacctaacaatagataatatagataaagaaaaaatactaaaggatatcacagtgtagtagtctctagtatcttttcatagtattttagcggctatgcaatacggagggataaaaaaaggacctcttacggaaagataagaggtcatcaaaaagataaaaatgttgtatttgaaacacgcgagtttctaattcacatcataacacaatatatttatatattcaatatatacattaaagataagtaatgtatgttcaaaaaacacatggaatattaatttgtaacagtatatattttcctcttttattctatttcttctacaatgccgtgattgtaacaaatatccctctttcttttttggatgattacgaataaaaatactacatgttttctgtctcacttggaataaagcatcatggtaaaaatacaatgctgacaagtaaaatacttaatacaatcaaccctatccctaacatcatccattcaccctttttagaattttaaaatttagcccttcactttcatatacttctcttttacatgagccaataagtccctcagcttattctctgaagggtgttcttgattttctggaacttctctgccataggatgaaaagttttgtgagcatgcactagttgttactttcaatttcgcgtatgaggatgtacgctcatcataactggattacgtcttcttggggataaaggggacaggaaagttgctaagctagcgtaaggtgctaaattccctcaaattatctcaaaatttggatactcatttaatatttctatactctccaacttataacaaaacacatcgcaaaatatttttacgatgtgttttaaaagggaaatcatcatcaagtttttcacccatatttttataaggagttttaccattgaggataaacgccttcatttcaaaacagttcttttcatttgtatacgatatgtctcacacatatagtatacaaattattacacttacttttcttcaccgcttgcttgcatggaattaaaagtccaatttaatttcaacgcatctccttgtacagcttttgcttgtaatttctcaccatctacttttgttaagcggaacgatggaatagatgcagtactttccccaagataacttgtaatttcaccatctacattgttatatacgattactgcctttgcgcctgcttccttagcatgcttaatatttattgaagaaaaggtgatgcatacaataatcaaatctaattaacatattatttaattatcggtagcgagattaaagagactccctactctcaggaagggacctccaattcatattattccccctatttctatgtttcttatttgattctaattaactaactgattagggttattgcaaatcaaaataataaaaccacatctccaattattagataactatctaatacattggaggtgcggttcacttaggtcattgatgtttcagctattctctttatttgaaaattacatctaccatattaatttaatattatattcctcaagccaactattaacttgaagtaaataatctattatacctcgtgcatcattacctgaaattacttcgtcttttccttctgcaatagcacgaactctttctacattaattaatggcaaaataggtgtctacaactgaagatggtgattttgaaggggttttattgagtggattttttgcaaagcaagttatgaaattggcttctcaatccaatcatatttctcatgattttaattcaaatgatcttagatcttctgatctaactttaaaaggagtttttctttttaatggtactggagttcattttgttttttatgagggtcttgagtctataaggatttatgattcgccaatgtttgaagaggattctaaagagatgtttgagtattttaaggagtggttacatgcacattcttgatatttactttagtaaacgttgtgagaatgtaataaaacatatttaacagtttactgtgtaaatgggcactttgtggaattgtttatagagaggtgttgttatggacactttgtggaattgtttatagagaggtgttgttatggatttaaaaacgtattatgcgaatgttattaatgaactagaaagtattttattgtcttcagaaaaggtttgtgaagacaattttttaaagattgaacaatatttaagtaataaatcttttattgaaaatgatattgactatattttttatcatttagataatcttgagtgtttagtaaaagatcgtgtttttcttgaagatgctttaaaaagatatagagaaaagttagataaagtaaagaagtaaattcatagtttaatgtagtttctacttaactagttaataataatagggatagagtcgcactttttattcgttttcttagaaaggttgttttttatggctttagatattgctaaatgcggtcggcggaccatcgttttacgcgaaaaagctactggtgatgttatgatccgaagaatgtcctgtaaccagctttcttgccctgtatgtggtccggtcattgcagcacgtttacaacttcgaattaaatatttttctcagcatgaacgtctattcttttttaatactattacttctaaggatggtattgatgatctggagaagacttttaaaaagattcgtaaagaattgtctagtgattttacgattgaaggatatatgagacgtaaaaaagttagttacgagaaagctttaaaatggtatgaaaagaaaaagaaaaaaatgatagattttgatattgatgttgaacttggaatttattcaagaaaaaatgcaatcattgaagttgcaaatttaaaaaaggtttattatttgggtttaaatgttaaacaaaaaattgaatttcataagaaatataatcatttagtagacgagctatttccggctattcatgaagttaataagcgagatgaaatattacataaacagttgtacgaacgaattttaagacgttttgaagagaatgaatttgaagattttaagtttattagggtagttgagttgcatgaaagtggacaacctcattatcattttttatgtaatcgttatgtttctcattatttaatgaagaagataacagttgaaggtgtgagtgaggtttatgataatgcgtatattgtggatcatgctatggagagaaataaaactcttacatatgacactgtagatactgatattgtttctttttatgtatcgaaagttactagatatgttactaaggagactatagaaaccttttctgaattggaaaaggaaggtgatatagctaagaaattaattagttcaagtaattgtatcaagttgtttgatgaaaaagatgaagaagaatctaagtataagaaattaggggtatatgattatcaaattaatgcaacaagttatgaggttccaaaagtattagaaaatagtgtagaagattttattaagtttcattctgtaatgcttagggatcagtatgcaattgatttattgaaattttcaaagtcattggatttagatgattttataaattgtaactatgtaattcatgagcgtttaattcaagtttcagttgctgaatataaaaataagttatcgactgtttttgatgagactgatttaactaaagaacaattagagttattaaaatcttttgtagaaaataaaattacattattgttaggacgagctggtacaggtaaaacttatactttagttaatttgttgaaaaaattaaagcctaatccacgtacaacttttattttaacgtatacaggtaaagcgtctgtacgaattaaagaattgttgagtcaacatgaattaaccgaatacaagcctatgacagttcataaagcatgttcatctaattggaattcgaattttttaaagaatgagtataataacttagaatgtgagtatttgattattgatgaagtaggtatgataccaagagatattttgatgaaagtattattagctgttcctagttatacaaagattatttttgctggtgatgatgctcaacttccacctgttaatgattcttctgtaattcctgaattagaaggtttagattttataaatactataagacttacaaaagtttttagaagtggagatactgtgttagagcttgcatataaagttttaaatcgtgaattaattgattttagattatatgatgaaaaacaattagaaaaactagttttaccacttgtggaacaggggtatcaaattttaacaaatacaaaaaaaatgactaagaaaattaatttaatagttcaagctaataaggataaaattacgaagtgttttaatgattattgttatgaaatcggtgatagagtcatgatcattgctaatgattcatctagaagggtttataatggtgatactggtaaaattgttgattatgatgataaaggtattttaattcaattggattttgaagataggcaagtgttttatagatatttagatacagttaatattgtaccagcttatgcatttacagttcataaatctcaaggtagtgaatatgagaatgtggcggtatttttagaaagtcagccgaaattaaatactaataatttattatatacaggaattacaagagcgaagaaaaatataaaagtttatgtgccggatgaaaaggttttatcgactatgataaattgtgttccagaaccggtttcgaatataacattaaataatgtttttgatttagtaaatgggattttagatataaaaaaaacatcttcaatgggctgaagatgtacaaaaatgtagattcttcaatgggttgaagaatcataagactgaaatgattgttaaagaatctaattgtattatatatgtaatttgtagcatggtctatttaatttaatttttcggaaggatttgttgtttatgtatggtgcttatttagatccagaagatagggatagaataatgggtagtttgtctgatgaacaacaagagtatttacgtatttttttgaagagaggtaatcagacagcattctctagtgtgttagctagattaaaaggtggcgaatctgaagaggatgctgaacatatatctactcaatggatgtttattgagtagattgatgcaggaaaagtttcgaaagatcatccgtgtgagtgtggtcgtcctttacgttatcaatatattgttaagaatttagtgactaataaaattttaaagtttagtaaggatcactttaaaaaacatacaggtttaccttctagtattgttaaggcagttttgaagggaatgtataagattgattgtgagttagatgaaattttgattaaaatttcatctggttggtctttatttgagaacttaggtatggattctattcctaatgatttgattatgcctatagatattagagagcatttagaattagatttacctttattagaacgtcaggttatgagattaaaaggtgatttgagaagttataattcattaaagaagaatattgttgagaaaaatgattctgtagattttgaaataaacgaggaaagagaagaaggacaagcttctttgtttgatgaagacattgtttttggatttaatttagatgatgataatgttcaaactatacgaagtcagcctgtgaaagtgaaacctgtttctattgagaagaacatttcgtatcaatttttaagttttgttgaacaagaatttattttgcagtttatacaaaatgttaattctgtaagtgtgagacaactatgtgaatttatgattaaagaggttggctctttagataaacgttatcttactggaaagcctcatatctacgttcatgtttgtagttatttagattttttagtcactcaaggcaagttgagctatattgagaatttagattatattgatcgtatttattatatagaatcagatattagttagaagggatatgtatattatcccttctatttttttatttatttaatccttttcttataagttctagaattgttgctgttctagtagaaattccgttttcttctttgtattcgtcaactttttttaatattgattgtgggattctcatttctactctttcttttttatctgtcattattatcacctcttcttgtattgtacggaaaaatatcgtataatacaaattgtacggaaaaaagacgtatttttcacgtacaaaaaatgaaaatcaaaggggattttattatgttagaagacaaatttttagaatctaagattaaaaaattaactaatcaaaatgtagtggtttttactgatgatgagattattgaaggagtccttttggataaggatactggagaagaacgtttgtttgaagtttttcgtaagatttggggtaagaatttcgcttggtttggagaaggaatttatattcaatgtgaagatacagtgacgtttcgtgattatgatgaggtagataatatatttaagaaatagttttatataaatttatattaaatgcagattatttatagaagagcataaggtttttttgctatcactaaaggtgacaggttagacaaagcctaacaaaaacgtgatatcataaatatgagaaaatcaatggagtttcaatgtgtttccaatgggttttcactgtatataatatgttattagaaattggtttttttgcttttagattgataattcttgtgaaagataaaatgaaattccatttataaatgttgtatattttaatagttttataggagtttttaagaagaggttgatgaggatcaatgcatagcagccatgtgcattattgtattagcgaataaaaaaaacgatatgttaacgttacccaaaaggatagctttaacatatcgttttttttatttttatgcctactacggtaaggctacaccaattttttagttccaactaaggtatggatactccaaaattaatcatcattcttttgttttatgttgttgcgaaggtgaacagaaaaaaacttcgctgaatttcgtttttattttaccacaaatttaattttttggtgcatttttagtgaccactgagtgaccactaagtgccaacaaatgaccatcagaatgaaaaaatgaccacccagtgaccaccaattaataaataggcgtcccagttttcgtggtcgtttagtggtcatttttggcgcgtacaaaacgcatacttttaatttttttcacatacaaaacgcatataaaatgaccaaaaatgcatacagaacgcatatgagtaaaaaaagacgtcccactttttcgggttaaaaaaacgttgatttaaaggggcgtaaagcgtgctacaagggacacaaaacgtgccacaaaagtgctttaaacgtacacaaaacgggctacaaagcccaaaaaggcatcccgtaattcacaaaatagaaacccaataggctcagcctatttcatcactttttttataaaatgggattcggtttccttatgctcttctttaaaaaaaggtttatatggctttttaagctggtaaatattttgtattaaaaaaagaaaatgcaggataaggagagggacacagttgtgtctacgtgtatcagtcaaagcctgatagaataatttttcattgtgtacagagttgtgaccacgattgaaaaagggaatgcgttttgtggtcacaaaacatttataaggtctattttactaatgttttgatgtagccttactaatagatccgacagattaaataattaatgtttgtggcaattagcgaggaatggcgaagattagggaagacattttttgaagtatattggggcgaagtattaagatttttatccaagtaatcgttataaaaaaatcaaaatgaaatggcagcaggactaaattcaggatcgttggaggtttaaatacgaatatagtgttggggtctcaagaagagataagtatatatttagagattctatagaaaaaatatttttaatatttgtcgcagaattagtgcttacgccctaaagattatgttaggtatggcgcgcattcggccttaggcggatgcgcgccagggatagttaagcgttaagaggatgaaaaatattaacaaggtagttatctatagagttatttaatatatagttggatctaattgtgagttatagaagatatagccgatataacttcagctataaaggtagaatgattaaaagaaggaacgatgtatatattcatcagaatacgcaaaatcacttctggaaggtttgaaatgtgaatcggtagatggaaatggaaagcctgtaagaagccgtagcaaggcgaaggagttttatttagaaaagttttttgatttgtaaaaagttttttaaataaaacttgatgtcccgtagggttgcctaaaggaatagtaaatcaagctattgcgtactcccaaacattgtttgggggacactcgctgtgagcgtaaagggtgtgggaatatcccacgaataaaaaatttttgtgtccctttttttaaaaaggacggtttgattttgtggaataatacgggacgtgaaattttattatgatttataaagtttatataaattataaaacaaggagttatatcggttatatcgaatgtaaatttgtgaggtgattgcaatggttattatatatcaaacaacaaaacaagcagcacaaacattaaatattaatcatacaacttttaaaaaatattatggcatgtttgagagatataccggatataacttcttaagagattcaaaaggacaggtaatgtttagtgaatatgatttagaagtatttaagaggttattattagttaaggcggaaccaggaaggactatagaagaatcgtgtagacttgttggtgaagagtttggtatttcggataagaatcgagttataaccgatatatctcctgaaaacggaggggataataaggcgattgaagagttaaaggaattgattttaatgcagaataataaaattgatgaattaactattaaattaaatgaacagtcaaatcaaactaagatgattgaaacaagcgttggagatagagatcagcaattggttagattaatgaaagaaatgctagaagtgaaaagaatggtggcggcaagtaataaaaaaagatggtggcattttttcagaaaataaatttagccgaaaaggctttttttattgttttatagactctattgatgtaaaattggtgttaataaaacatcaaggaggatcaagatggaagaattaaataaaaaaccacaagctgaaatggttcgtgttaatactcgtatttctaaagaagttaatggttggttagatgaaaaaagcgctagaactggtgtacctaaatctactttaatttatttggctttggaacaatatatacaacaacaaacaatgtttgaggagttacctaaacttcaacaaatgtatacgcaaatacaacaacaacaaatggttcaaggagatttgttaagtgtggttaataaggataacaatttagctaagtttagtttgtaatttaattttaggaggagaattaaatatggatgatgcattaacaaaaattttagagaaattggatcaacttgataagaaagtagatacgattggtagtgaggtaaaagaaattagaaaagaaatgcaagcacatcgaatggaaatagatgataattttacgaagttatataagctagttgaggataaagatgttgagattgatgttctgaataaacgtgtatttaaaaatgaaacaacagttgaaaaattaaagagacaaaaacattaggattcatatgtgaattaaaattatatgtgtttatttttaaagaaagaagatatttaaggggaatgatatcttgcaaaatattaaagagataaagaaattaattaggaagaatcctggtaaatatgcgagcatttctacaactgaagatggtgattttgaaggggttttattgagtggattttttgcaactaactcagatttaataactacatctgtacgtaaaacatcaaatatttccttattcaaatttttcatcggcctgtaatcctccgcataaattccctttccatttcttttagggcttctttttcactttggattaaagttttctcagcaaaccctttgtgtggtgggtttggatttttacttgttccccagttttgaaatttcatataataatgcggagaattatctgctttgtcccatccaatttcaattgaataggaactaccttttttcacaactttccctatattaatagcatccttagcgtgttttccatctcgccatgattgttttggagttggtttttgcacctccggacccacaggagaatttctttctaagttctttttgaatacctttgctccagcttgtaatgattgctttgtgatctggggaacatcttgtcctaactgttccaaatccctaatccattcttctattccgaaaacttctaattctgccaatttgatcgctcctcacaaataaggcacatttccttatgttgttcgtcgatatcaataactgacttaatctcgtataacttcccatcataccttacacgcattgctgaattaataccttctcgatatcgaattgtaaagtttattagtttaataacaaactctgcatttccttgaaatatttctgatctaaagcctgtaccaaatggtgttttaggttctgcccatacttttacgaactctagccatttagacggatgaacatttccttcttcatcttttgtttctgatatttttcgctctagtatgatacatttgtttaattttgcggcatttaacggccgcttatatttaaagggctgcatattaatcaccgtctaacttaatttcttctaaggctttatcaatgctcaaactattaatttggcttaaaaaattcttatcaaaatactctaaggcatcgttataaacataacgagaacgttcaaagactaattctttgaactcttcatcattggtaatttcatagtcaccgcaaactcttagtaaagccttattagatgtaaaaaggatacgtcttaggttatggtcttcttcatcacctaaacgcatcctttctttaaaatcttgcaatatttcatctgaaattgttgcgtttctcatttacttcaccctttatttagtttttgtttctgcaggtggtgtaaatgaaatttctaaatcgtaaacaagagccgctttattatctttcggtttcccattagcaaattgtttaattgtataaagggtagcatcttcgaaagctaatgtttgatcaaattcttttagcttgtatccacctgcgattgcagcaatatattgtccttttacaaagaataatgctttaccaacaggaacttcctcacactcgacaggtttaatgttataaggcaatgccattacccattgacctgttgcggtctggattgtattacgtgcttgtacgccaatcgcatcaatcgggttaactaccattacaattttatttaatacttttctggatttcccttttgcatcaacagataaagcttttactacttcataaagttcgcctgctacaattacccctttatcagacggagcaaatgttagtttaccagaagattttttatcagtaacagcgcctgtttctggatttacatctttcattaaaccaactggttgatgtgctacagatccgccaccattaataaagccaaattctagaccgactgaatatgtttctactaaaacagttcgaacataacgttcaatccattccgggccaagttccttcatatcatttggaattgctgcaaatgcagttaatttaagttgaccaattttttcttgtttgaagatagcatcaatttgcccacggatttccccgaataattcgccccatacatacgccttcgttgcatcagagtaaataaacttcgtaactgctcctaaatcttgcaaaccaatttcagctaataagggatgttctgtaactaaatcttcaaacacacgctcttgagtcgttacaggaaggattgagccatctgtaaatccaccttctttaacaactgcattgaagaattttgtttctgctgaagttaaaacattttgaccacgttgctgtaaaattgaacgatcaagcatatcgttatttacttgttcacggaccgtatttgctacatctgtttgtagtgcatcaaagaaaccttcaaacgctgacgtttgttcttgttctgtactttctgcgttagttaaagtgtccgtcaactttgcttttgccttagtaaatgcttcagatttattaaatttaattaccattgtgtgtttcctccgtttttttataattttaaaaggagccctttaatcccactgttttttacaggtttaggattcggctcctttggttgttcttctatattgttttgtaaatcattcaggatttcattttttaatcctgataatgctgcatttaaatcttcttttgtaattccttggcctttgttcatggttccatttctaaagccatcgattactttctgcggaagcatggcagcagtagccgttgaagctgtcattttaactggattctccataaacatgatttcatccgcgaaattgttttctaatgcttgttgcggacccatccaagtttcttcagccatcatgttaagtagttcttcctcagatttaccacttttaatgacataggcatttacaatagctcgatctgttatttttaacatctcggctgccttttccatgtcacgatgatctccaccatgccacttagcagcgttgtgaatcatgatttttgctgttggagaaattcgaactttatcaccagccatcgcaattacagaagctgcacttgctgccaaaccaacaatttgaacttctacatgaccaggataattttttaatgctgtgtaaatttccgaaccctcatctacataaccaccaggactattgattgatacaattaaatcctcactatttgcgttatccagttgttttgtaatcttacctgggcttgtagcatccatttcaaaccaatcataaatccaagcttcatcattcgaaataattggtcctttaacgtcaattttcaccgtcatttgtattctcacctccttcagattcagttagtttcgtatagtttttcgtaatatgatgtgtatttaagttaggatcatcagaaacttcatatcctacttctaatcgaatctcattccctgtaaatgcacttgaagaaatgagtttatcgatgcttgtcgcaagatcaaatatactttgataagaaacagctttaacttcaattttttgacctgaaagatactcttcttcttcaaaaaatttaacgtttgcttcatcagaaatcttttttaataaaggtttcactgtgaaaagcatataatttttcgtttgcttctccacatcagccatctcgccatatatcaaagcagttggaataccaaaagccattgctacttgatttaagaagccattcgttactttattgatttcctccacactctgaccagaattccctccgccagatgtttcagcatacttaaaacctggttgttgtggaataagagcaacgtctttttctccaattgctttatacatgttatcaatgaattcttgcagtttggcttgatgtttttcactctttgcagcaagcatatccatatcaactgttccgcgaatttgattcttacgtttttgagaacttaatattctaccgaataaatcaccataatcagtaaacaaaccatcgataagaggtgataacttatcattcctgtatcttaaatgaatgacttcactttgcttaaaacttcgcttaaactgataatcttttacggtgacatttgtaaaagtatcttcaaacacagcatattcattatgttcaaagtcatcagcaataagtaaatcaccatcatccgcttgtataatcaaagcttcattatcataaataagtttgtaaatgaaactctcccaaaaggtacttgctgtcatattcttattcggtctgacatttaatcgatagtaaagctcatccttttcaaattcttcaccatttttcactctaaattctgactgactaattgttctccctaaaaaggatatacaggtatcaatcgccagtcgcttcatgtgtactctattggctttctcaataaacatttccacatcaaacataaatcctacttcactatttcttttaaatactgcatctagccatccaatgattatcaccccctttattagaatttaataccatctagcataaagtcgaattcatccacaagaatgttatccgcttgccatagcgcatgaataaaagcttgaaatccatctgttttacgcttaaattcatcttttttcagatactctttgttgccgtcttttttgatgtggacgtagacgttgttagtgtaccaacgcatcaatggattatctccaaaaataatgcgattgtttgcaaacaacgtttcaactcttggtgctaaaagagaatgtattgcctttggattacggatatacaacaatataaatccttcagcttcaagtgccgttttgacaagatcaaggcggaatgtatcggctacaatcgtattaacaccgtataactcacgcatttttacaaaccaatctacaatgtgagagatattaataactggttcatccacaatagttagtaagccattttcagcccattcatatataggtgcttttaatttcaccttgtccaaaaatcctttacgtacaaatgaatgacctttccatatataatcttcaccatgtttaaagagtagaccaaccgcagcaaagtctttaatgctggcgaagtcgagtccgcctacagctactttatgttttaaatctggaacctctctgagcgtttccccatcttcttcaaaaccagtacgcatgatttcttcccatgaagctacagactttgttaaatctgtttcaggataattcatacgttttgttatgaattcttcacggtttgaaggattattttctaattgtttatattgagttaatacctttttaaataattgtttagcataagaacttctcggctcgctaaacatcggattcgctttttcccatacatcaggattatcaatttcttctggattatctatcttgcaaatgaaagggaataatggatcttctaaatctttcccctttagaatattcatcgcccgctcttttgttttgtccaggaatccatcgcggacaaagccatctgtaccaataaaaaattctctagcatttggcacttttccaagtccactagagaatacatttactacatcaaagttttcatatcgatgtatttcatcgtaaataacacaaccgtcacgaagtccatccttagaaccagcattagatgtatgatattgaataatgctttgcgtatcgttactcagtatctctaccttggttcgataaaacatatcttctagtatttcttttcctttaatagcatcatagacttcacgaaaagaaactttggcctgtttctcgttgttcgccacaattgaaacattgtatcgatctattccgtgcagcggactaataaagaaatggcataatgatgaaattaaaccgtttttaccaccaccacgagccatcataattaaaaattgctcgtaaaaaacagaatcatcttctttatagaaaagaaaaacgaatgctgttaggaacttttgaaatgcttgcaattcaaagtaccatttctcagtgaattttatatagtcctcatgcatttcattatcgaaatacaaatcatcgcgtattaaaatgtatttctccaggtactcaattagcattatgcgctctttattcagcttaattttccctgcgcgatacatctcaatatattcagtgacataattattttgaatcatgttaaatctttaactgagcgcacaggttttgaaggaactttcttttcttctgccgatgcttctaatccaagtgcatctaaaatctttatcattcgatcatttgttttatgtaaatcattaatagaaggattggatttcggaccatgcatgccagatacttttattcctgtttcttcaatatcatcaacaagaacacactttaaatcccacaacgataaatagtcttgaattaagtcagtataatgattacctacaatctttttttcttttaattgatttgttagatccttttcaatcctttttctcattgtttcacgcttcactctagccacaatatccctcccttctgatttacatcgttttccaatttaatataacgcgcgaatttggttctaaatttgaaaaatcgaccccctccccggtgcctcgttccccgaaaaagattgaaatattttaagggggggattgtttctgaatcagttttaccacttttcatcgttttcccatttattcggtttcttttcgaatgttctaccgtgttctttattatggcaatccacacagactgtttcaagattgtctatttccaatgcgagttctggatgatgttctagttcttttttatgatggacgacgagctgtatcttcttacgctttgcactctcactgtactcattggtatctgtttgtactcgaccgttacgtttacactcttggcactcatagttgtctctcttctttacttgctctcgtatactcttccactcaccactgtcatagaacttacgcttctgttgtttggttttgtattctttcataaccgataaagctccacttggtcttccacaataggatgattgtgctgaataacttcagtattgaattgcttattatcagctggtacatgttcaatatgaatgtatgtccgattaatcctatcaatcgattgtgattcccaatcaaatgcaacacgtaactttctatctatctgtttacctttgtaatgaactataggtttagcatctatatctgttaatgtaattgttaataaaggttctacagtctcgttagattgtttgtacttctctaacttaaacatatctacaaacgcaccattacatttcggacaaacagttacttcttgatattcatcttctggcgcttgataagttttaatttgatagtcacaagctaaacaacatctagaaacattacacatctatcctcactccttaattgctcgacatttaatagaatctatagattccgctctacgtaatgtttatccacccttcatcctcctccaaaataaaaagccgctatctatatcgatagcgactgttcagatattaactattccctaatctcttttaatccctgtaacaaatggttcaagcacatactttgcagtaactcctgaacttccatcaactttcacttctacggtctcaattgaagatacatgtagaggatttattgaaaggttaaaaaaatgaacaaatcccttatacaattcccctttttcatttgagatacgactcataaagtcttctggatgaacatcaaggtcatattctttaccactgtccataataacttttgtatgtaatgttctagccatacttacacacccccttcccatcattctatatttcgacaaataaacacaacatccttttatcgatatataatttcaaatgtatagagaacgttattatttacaataaattcgcatacggtaaatgaagttttattcttctctcaactaacaaccacgacagaaactcttgtccgacttatcaggtctcctcattccgtctacctaggatgttgttagctcaaagaagagcaaaagctctccttaataacggtatcactcaatcagtaccatctgctggtttcggattttatgtgccatcattacgaatcgtttagaaatttagaaacaacatagtgagttgtgttttccgccacttctcacaatacaaatataacacggtatttccaaaacaaccggtacatatcctgccaaaaagcggtcacgactctgccacttattttttcttatcaatatcctcacttattctttgcaactgttttgcccaaatcagtggtttttggcaaccgcttatctcccctgttctttctccaatgagttacccatatcttgtattgtgtgtaactgaccccttcgccaaatcccttgatattattgacttaattaaactttcccttttgagttacacagtacgaaatttatgagtaactgtatagatttaaaaagaaaaataaaaaatgcacctccaattgttagactgtgtctaacaattggggtgcacttcaaatcgttagaaaggccttttctttttgcgttaaaacagaaaatgcatgtaaatttactttagattttaatttaaatgttattatatatggtatatatgattaacgctgtgaattcgagattcatattgttcattttaagataagattatgtagaaaaaatgtaaataattagcaaaaatatactatttattagttatatttaatgttaatatttgtaacgaggatgattggcgagggctgattaaagtttcactttatacaaaaaaggggcatgagggagaaggttatagccaattgtatagaactgaatacttccgtattaattaaaatacattgattactagatattaaaaaccaccgggggagattagagtgaagtcatttaagagagtacttatagtagggatggcgttgactacagtatcgattttgggagcttgttctagcgatacagacgtattaacaaaagcaggagcaaagcaaccagcgaaggcggaaggtgaagtactaaaagatcagaagaaaacacctatgactacgagcaaacgtgaaagtattaaaaatgaggatgcaccatcatcacaaaagcgttatatttctcatgatgaatctcaaaagattgaggaaggtatgacgtatacggatattcttaatacgattgactatggtggtgagaacataaaacattataataaccatgaaaaacgcgtattttatactgaaaaagatacggatggtacatatgaaattatggttgaattaaatacatatggttacgttgtaaatattgaacgtactgctataaaggataaagataaagataaagagaatcaggtatttacgaaacgtagtgaagagcctgtaaaggaatatgaagaaaaaaacgatcgtgtaccgtggtataaagatgtaaataacaattcggcagcagtaagttacaatcattatttgaaaatcaaaaaaggtatgcccgcgaatcaggtaaaagctgcaattggacagccacatgtgattgagaaatataaatcttattcagtatatgactatactggttatggtggagaaggatcattacgtgtaatctttgaaccgaatggaactgttacggatatagtggaagacagtttaccacgataataaattagttacgggaagaattgtagtaaagttgtctttgattttataaagtttttgggagcatctccgaatataggtgaaaaaataattctcttagccatgttaactacagtattagtatttaccgaagtttcttccaaattcaatagcgttatcgtggatgttgttgtcgtattatctttgttgatatataccgcagtagggcagaaattgtaactggacgcggaggagtagcagcttccttttaaaagaaggaggaaaatatgatggaggatattcttgaatttatagggagatacgtaattaaacctattattagtttagtgagatatcttgtaatagagattataattgagggcataatagaaggcgtaataaacggtataaggaaattacgtgataagtggcgaaattggcgtgaaagacgttattggcggtagtgtagctgatgagcgtgagaaacaaaaacgttatacagaagcttaatggaatgacaatttctaaagtgaagaaataattattatcttacaaaagtgtaatgttcatgtcatgtttttgaatttcttctttaagctccgggctttaagataagaatataagaaaaaacatatgaggtgaaggaaatgaaaagatacattgcactatttagtattttagttgtatttgcaagtttgttagttggttgtgatttaaaccgtatgggtaaagatgagtattatgttcaaattacagtagatggaaaagaatttgatagtaaagctagtaatgggcagaaatttaaagattatgaatataagctgactggctttgataaagacggtaaagagaaagaattagaattcatagctcaaaaaaatcttcgtaaagaagcattcctacgcgtataccactcagataaaaaaggtgtaacagcttgggaagaagtgaaaaaagacgagcttccagcgaaagtgaaagaaaaactaagtgtgaaataagacagataaaaaggaattgacgaacagggtcttttctaaagttgtaatatcaacgatttatagttaatcggtaacggtttggtaacaattatagcaaatctttttccataaacgcaactacttctgcttgcttcgaaggatacaaatggctataagtatttaaagttgttgctacatcagaatgccctaatcgctgggctacaaccagcgggctaacacctttatttattagataagaagcatgagaatgtctaaactcatgcattacaatctctttaaccatagcaatctttagatagttgttgaattttttatgtaatgaagttgtggcgagactatcatagaattcaccaaaaacaacataatcatttttaactggtgctgttagtgcagcatctttttttatactttttaataaattcattacaaagttaggtaacataataattcgattagaagctttagtttttggttctgtaacttgacgattgtatttagttttgtgaatgttaatggtcttttcttcgaaatttatatcttcccaagttaaagctagtagttcgccttttcttgctccactataataaagagttgaaaagaatgctttatacatgggctcatctaccacactgataaactgtttaaattcttcgaattcccaaaagttaattcttttctttgattctttttgaaaattcccagcaattcttgctggattggttgttaaaccatgaaattttatcccaaaattaaatattgctgagagtgtagtgtggaatttttttaaatattccgcagagtattcattgatcattttgttttgatagtccattacatgtctaggtgtgatacagtcaattttcatttttccaaattctttcattaaatgattgtagatggcattttttatggtatttattgaagattgtttcctcctctgcgtataccaattgaaataactatctgcaacgtgctcaaatgttagattggagtttgattctttttcaactaacattttagcttctgcttcacgtgcttctttttttgttttaaacccacgacgttttacttgcttggttgtcccatcaaactgacggactcttactacgaagaaatatgtacctcgtttgtcatccttatagatcaccataggggttcctcctttatataaagagtgataattcaatttattgaatagattatagcttgtttgttaccaaaagaaaagatgtcccaatgagaacatcttaataatggatttaagtttgaagaaataaccattggtaaacggctaattttatgttatgccatttgttaataaaaggagtcagtccaataaaagaatccgctgcaatctgcaacggattctagtcttagaagtttgaagcaactaagacgttttgtgatggaaattcgattataacatatgacgtttaaaaaccaaatggaccttataggatttgaacctatgaccggacggttatgagccgtctgctctgaccaactgagctaaaggtccttgtatgaatagtatatcagcgtgtacaaaaaaagaaaaggcacaatcaatatgaaagtgtcttttctttcagcttaatattcctttaaataaatagaggtgtacctcttttatcaggatgtaaacacaacctataaaacagaatcatctttaaatccagattgttagcacacacaataaaaagaagcgaggtaaatatttagataaacgctatgtcactagtgcgattgacatattacgctcttaataataagagaatctgatttatagaatgtatccacgttttttattgtactacttctattatgtacatggtgtattttttggtgattatgcaaaattgcattattgcagtttctataaaacacaaaaaaagacatccaaataaggatgtctacgaaattaaaccatcttacttttaataacagaagagtaagggaactcaattattattaaaccatcatattgataaaaacagaaaggatacttttatattatcatatagtgctatctgttaatattgataaaaaataaaagctaatttttgggaaagagataaaatttaataattggctgggtgtggatttttcgtaatggctggttttgtatcactaaaattgaaatatactaacaaaacaatggaggaatgggaaacaattgtcattttagagaaacaattgttgaaaaaatcaaaaaagacaattattttaaaggggattgtgttatattgggtgcgtatatccaattatggaagagaatttgcagtttcgaaagtttatgaaattaacaaaataatattattgaacataaatatagacccatagaagcgtgtgtacaagtgttgtgaccacaattacaccgttccctaaccgtaccttaggaaacacttgcctcgtatgagtccatcttattatatcatacattagcaatgttccttattgaaaaataagttaggatggaaagtttatgttcggagaagggggaagtgaatttgcaacatgtaatggatcagttgttgaaaagaatagaattttgcggatattcaagaaggaattttgctgagaaaatcaaagtaagtcgtgaaacattcaggagaggacttacttgtgaatatgaaatggatgtagcagtattttttcaatccattgagattttatttgagcatccaactgaaaaaagaaaaatcataagagaatttttcagtatgtgtgaaagtatctctaacattgaagtggctttaatatattgtcaggttcaaggtgaatataatctgatgcaacatttaataaaaaagcatgaaagtaaaaagaatttaggaattttctttagcatatataaactttttaataagaggaataaaaatgagttaaaaggacaggcactgcacgatgaattgaacaagcggcgtttttcttcgaatccacattgccaggtgatggtaaatatactgtatatgctagcattagctgataagccgaataataacgccattattgaatatgtagacgctgtagaagcaaatttaaaaaaaatcaaaaaaggtcatattaaagattatcttagtatgctagcaaatgaaagaaaagcatacatgtatctttggagagtgcaacttgatgaatgtagggaaacatgttataaaataattaactcttccctagatattccaattgtcaaagcgacatcattatgttgcgttggtgaatcttaccagttcgagtcgccgattatgtctgaaaagttcctagaacaatctattaaaaaattagaagaagttaatgtccctgtaaaaactcaaaagtatatagcttttcaaactacattggcgcatgtaaggataactaacaatttaaacattgataagattgatgttacggtaattcatgaaaatgaacaggctaattatgaatataactatggtgatagagagttaggagtttcaatgtttgaacagatgaaaagaaaaggatttactccttttcaacgtctttcttattcaaaatgtattggtgatatggaaggaattaaacaagctctactcgaatttgaattagcagggttaagtttttatggacagttatgtaaggatattttaatgaacaaaggggaagtgctacaatgaaaaagaatttaattgcacttttaatgtgcgtaggggtattaggattcggattatttggagaagttaatcagctagaaaaaacaaatccagttcagtatatgatgactgatcccggcggaagttaatatagttactataaaaaagaaagtcgctacttcggtagcggctttcagtgcgtttaaggagtgacacaaataaaatcacacgtcgtaaaactgtgtcgcctgatttttgattaaaatgaataggaggaattttaatgttaaacactgtagaggtagatgttaaagaaaaaataagtgagttagttgaacttgcatataaaggagatcaagaagcaattgaaaaaataatcaaaataaaaaaagaacttggtggaagttaatctgccaagttctttttttatagatcattgatcatatttataattttgcttcgtttatcagcaggaagctgattaatacgtttcatgatatcttcaacatcatctgttattttttttgatgtttcttcatcaaaagttttatgctttgaaagccccataatataatcagcggaaacgtttgtaacacgagctatattttctaccgtttccctactaggttcacgtttatttgattcatatagcgaaatcattgtgtagtttacaccgacagcatctgcaagttcattttgtttcatttttaaagatttacgaacctcttttatacgactacccatagtttcagacattattaaacctccttttaactttacgtttatttctctctttgttatatataatgtacaataaaactttgcttaaagacaagtttttttattttttttagaaaatatactttgcaacaagcaaatttaattgtacaatgtgtttaacaaaagaaaaataaagagaaaaagataaacaaatactttgcaacaagcaagtttttattatcaaaacctttgcttgttgcaaaggtttagggaggtatatagtgtggataatgaaaaagacttatctgctcgagaagcaaaaaaggcttacatgcgagcctggagagcagctaataaagaaaaggttaaagcaactcaggaacgatattggaagaaagtggcgcagaaaatgaatatggaagaaagtgaaattaagaatgattacaatcgcaattggtatcagaaaaataaagataaaagaaatgattacatgcgagattattaccaaaagaaaaaacaaaattcttaaggtaactgaaaaaaggtgataacaaaatgatagaggaaagcacgttttcattaatgatagttgcaatcgtgatttgtatagtctctttagcagtttgttttttggatgagccaattgaaaagtttataaaggatgatgatagagatgtataaaaacctatttattgttcgaagagaacatcgtatgacgcaagaggatgctgggaagttagtaaacatatgccagcaaacgtattacctaaaggaaaagggaaaacgtgattttactcttacagaagcaaaattactcgcacaacattttaaaacaacagtagacgacttatttgcgaagtaactggaggggaattttaatgaaaaacggtaaaaaattgacaaaacgtgaaaaaatgcaccttaaatcatacaaattgaatcctgataattggttaatttttaagaaggtagatggcgaactacatttagtgcatcgtcatacgaactcaatacgagtcattccaagtgcataggatggacaagcactattaaaaatgaggagggtattatatggattaattaacagtagcaaacgaattaaatattttaggacaacaatatattgctggttatcagttcaccggaattgagggtgggttcggcaaaggtaagaaagctatgttagttaaggaaattgccatcattcatgataagccaataaaagaaattaatcgtcgtattaatgaaaatcgtatccgttttatggacggaattgatattctcgatttaaaaagtggtgcttttaacccaccacaattattaagtcttggcttttcaaatatgcaaatcgcaaaatctaataacatataccttctatcagaacgaggatatgcaaagttattaaaaattctcgaagatgagactgcatgggaattatatgatcaatttgttgatggttatttcaatatgagagccaaggaatatcaacaacaagtgcctacagatccaatgagtattttaaagcttacttttgaagcgctagaagggcaaaagcaagaactccaatcttctgcaatatctagtaagacttgcactgaatttgttccaccttctcggctgcacacttccaacatttcatggaagaaaaccaattctctaaagttaaacgtttcattgaatcctctaaatgcacgatgcattgtggttccaccttctaataaaagagaaactttctctatttcttcttgaatgctttcatgcatcattggcttcacctgaactaacacccgttttgcattgttactaatttgaagcgcattcgctactgccttcatatagatagatagacggtcaatgacaaccaagtagtaacgtttttttcttcgatagagaagaaatcttggaactaaaaatccacataaaacggaaattagtgtaaaaggatctcgtccaaaggaaaaatagaataccgccgcaatactcattccagaaagaatcgtatatacccagtacatgcctttcgtcaatttccactcgtacttttgggcttcttggataacggattgcggtagatacacccgtatccccttaatattccttaactccaagcgcctttcttctttctcattttcttgtacaaattgggaaagagcagaacccttagattttgcaaaaagtaaaacgagcaatactacactgataaagattaaaaatatacatccataagccaacaaactatgcatactgcacctcctgttgtgaaaggaatggcgcataaagagctggatttacagtagaagaacggaatttcttctccatttcggctgacatttttgctgtaacgatatgatccccatgaatctttcctactctctcatccatttcatcgaattcctcacctgaaggaataaattgagaaagctgattgaactgtatatcatcttgataatctaacaattcaatcatctctgtaatatagcgattaccatcatctttcttttctaaaaagacaatcacatcaaatgtctgagaaattaattcatataaatactgagcatcgatattcgcaccactctgcagacacatgagcattaaacgtctaactgcttcttttgcacttcttgcatggacagaggtaaagccaggatgtcctgtttggaagaagttaatcattttcaatgcttctttccccctcgattcccctacgattaaacgttttggtccttgacgtaaagcatttgttaacaacctatcaaaatcgattgcattttcttcaacctcggatgccctacactgcatcggaacaaaatgatgttccggaaaaatgcgatgcaaatataattcagggttatcttctactacaagagtacgttcttttttctttcctttcggaatgtgagaggcaagatatttcataaactctgattttccggtacctgtagctccagcaactagaatattcattttggctttcacagctgcggccaaaaagttcagcatttctttcgatgcttgattggtagttaacatacgttcttcagaggcacggaggtgatctgcattcttacgaatcgttattgttgttccgagtcccccaagttcatctaacgcaatattgatacggatatacggaaacacgcagtcaacatatggctttgctgtatttaatgactctgatgtactgtttaccatcttataagctagagctttcacttcttcttccgtctcaaatcggtaaggaaatgtacattctccctccccaattttttcgtaaatgatttcttttgtgccattgatataaatatcagttacatctttatcttcttttaaaggttctataatcccaaaccccacaatttcgtcacacaccatatttagtaattgttcagaaggtacctctgaaatgacaacctgattactcaataaaaagcttttaataatttgttctacagctgctctcttttctttattcataaaggattcacttaggatatcacgatggtcttttactaaaaatgcacgaatttcatctgtaatatctttaatttgttgagctgtagttgttcctaactttcgagctgatttggaacgaatcatgtaaccaaagtgatataaatccacttgatttcgctttaaggcgatttgtttttcctgtaaatagccccacatactccttgtcccccttttaatttcgtaaaccaaagagaccctttttcatagaggattgctgggatggaataccaagaccagctgcttccataatgtgatggacctttgtattaatttgcggggaaccaaattgcatcccccattcgtaactcgtacgatctctgtcatacggaatggttactgctattttttgagaagaaagcttttcaatatcttctacataattttcatctgccatgttcaaaacatgaatcatacgaggcattgttagctttgcatcttcaatcagctttaattctcgcttaatagctaacgcaccacgaggatttccgtttagcacatgaacaacaaggtctgcttggtataggattggataactcagcacctcggataattcagttggcaccgatagaatgatataatcgtattctgtgtccacaagtgactccataaatgtagttacaaacaattctttgttttgaatctcagggaattgagctaagttataacctgatggaaatactagaaaatccatcttatcgtgtaatttttgcatcaaccttggattcacttttttctctagcaaatcttgcttcgtacaaatatactgcaagaggttgtaatcattttcttttcttacaagctctaatatatttttactatcgtggctaagaccagttccaaccgcaaagcttggccttacttggtctgcttctacataaagtacctttttccctaaatgagctaactcatttgccatcgcaatacttaacgtgctttttcctacgttttcatttgtggcataaaaggcaaccattcttacttgccgatccatcttaaaaactcctttcttacttagattcgctcagatactgcgctacatactcttttacatttttagaaattggattggtcgaatgcttctctacatagtctaaaatgttcttttgatcagatatttgcgagaacccttctgctggttctaattctttccctgtttgttctattttttgtccgactgcaacaggaatcacatctccaagtgtttttgcacgatttaagtattgaagttgttcaggtgaaacagctagcgtatataatcgcgttactttgggcttttgttttccttcttgttcttcttttgattctttcttttctaatacaaatgcatcttctgtattgctatcttttgcggccgtaacacgtacacgttggaaaagaccaccaaacacaactttctcattgtcgccttctttcacaacctgtttgaaatacaagtcgacatacgtgttcggaatgatactattacctgaacttgtttccaaatcaacgagtaacgggaatgcaacttctccatcttttaaatttaaaatggcagagtcaggtaactcttctttctttactactttgtttttaaagagatagctattttctgtaatgggctgcccatcatttgtccacttacctactacttcttttttatttgcacgtaatacattggggggaatcgcatcaccaggtaatgttcgttccactagcatgtcttctttaatctctgtatgcgcaggtatatcctttgcggctacaacaatctttgttggttttactgcattttcgactgcgaaatgattgtacccatagatacccgctactgttgcagcagctaaacctaccgcagcaatctgcttcttttgaaacttagatggcttcaatgtttgtattcctccttatgtagcctttaaacgcaaaaaaaggacacacctatggcataatgcgccttaggtgtgtccttttagctaatctaaagtctatatgaaaatgttggatttggtttctttaatattacaatttcaatattatgatatatagagtttcatgtcaatcatttctaaaaaaaatattatttttaccatttcaaatctctgatcccaaaacttgaaaaaccttaaaaacgttgtcatatcaaggtttttaagctattaacccaactataaatatggtataattaatataacgtaactgaatatttcagggtggtcggttgctatcctttctctttcattttatggagaaaggaggtgatcgaatggatatacttttcacgatagcaattgagatactgaaagtaattgctagagaagtcgctgtattttttgcaaaacgagtaggtaaatacctatcaacgtcttggaagcaaatacaaaaaaagcgacgaaaaacgaaaagaaccacccacaatgccggcaagcgtttgaagggtgattctaagaaaaaataaactcttttttagcaaccatccaccttgcggtagcagttacataaggcgaagtgttaccagcacttcgtctttattagtttatgcaaaaactatctttataatacttctacacatattataacaccaactatagtacctgtcatgtatattcatccactatagctagttaaataaaacaaaatacttttagttcgaaatcaatttcgttcctgtttcaaaatactttgcgggagcataactcttcccattccgatcctgaaattcgcttccaatgtatagcgatacaatcattgcgacaacccccataataatcgcacgtctaacacgttgttttttctttttatccactctaatttcccctttctatgaaaaaaaggcacatcccattaagggatgtgcctttggtttatccattcagctactagtttatgatggatatattattgtgtcgattcatcaaattatactatattttatttttatttcccagtcttcatgtaataccaatcagtcaatttatgaagtagttcttctttccctacccagttccatcctactccacttcctccagggaatggatcatcaggaaatactcttctttttatgaaatcatcgtacgcaacacccttaatctctacttgctcagttaaacataaactcatttcattgatacctgctggagctgtttctacattaaaagtgtatacaccatcttttgtcttcaatggtgaataccatttttggccaccatcaataattttctcttgtccatcccaatataaagacttagttggtcttttactatcaaaaacatgtcctgttgcttcagataaatacatatttttaggtaggaacttcgctgtattatctttaagttctttcttctctaaatcttgagtagcctttaatccttcgtctgcaaatggatattgtgccttagcagcagcaaatacaccagggtaatttgcattccagtcatttttatattttccgtttacttcatacgaaaatccataaccagaatgtagcttagaaggagctaaattatcaatactccctgtcaaagtttcataatacatttccccagttatatcttcttttgatacacgttcacttactgtttctactacaccttttacactcgttacaccacacattgccttttcttttgaaggctcatagattgctgttttaataggattatttttgtatgtagtttcctcgatgtctatacggttaccagcagggttaatttccgcttgaattgttcctttacctttatgttgccagtcaagattcagggttttcttttctccctcagttaatcttaccttttgtaaagctacttgttgtccgttatgttttaacacaactactgtttcaggattcgtatatttttcttctaatacatctaactttttaattttattcttctctttttctaacttctgtcttgcattatctagcttacttgccgcactatctagtttattttcttcccaagagcagtctctatcataatagtgatcctttccctcggcatctacttcatgaattggattacggcgacaataacttagactagattgagcgctatctctctccgattcagagctatttacttcttgttgagacttattaatattgttgtttacctttgctctatattggtcacgttccggtttaaaattatcacgtgatacatctattcttgtttttatattctttccttctcttgctgtttctccttcaattcggtcagcagagaaatcgattttatatttaaaatcatcgtcatcacctggatctggattaggtgttacttctgtaccacagttaccatttatggtgaaatcaacagttttctcatttgattccctttgaacagcatcaatgactttaattttcgcagtatatcggccacacatttgtggctgccactttagttcttctgacttaaattgccctgcatcaccttcatttggtttttgattatctttttgcggagttgaacgcagataattttcttgatgatacacggtttcgccatcttttgtaatatctaacatccatttaactcggttccgttcacctgcagctgcttgatatggatttactgttgtgccatttggatcccgatcattatatcctttatttttacttacatattcgaatccgttaaatgtaaatttcacaggtacatctttttttccactcgtagccttaaaatcttttatttcaggtttacttgtgcgtacataccacaagttatacctatttacaccatttacactaccagcccctgcgtatcctccagaaagataggcaatatccctaatccaatagaaatgtccataagattcaaaggaatcttgatttgtaatcttatgtggaattaaatattttaaaacaaactgagagttaccccaatatttatccgtaattatgctatttgtaattctctccacttcagttaccattctatctcctactacaactgaagggttaatgtagccgtcatttgatatacgcacataaggctctgactggtcttcattatggataaggttttcccttggattcccccaattaaaagaaccattataaacagcaggaaaatgtatatcagctttatattcgaactcttttggcttatatctacttccagacctaagtagttttccctttaattgtaattcgtctgatgctaaaatcgtagtttcatttccattataaaatggtacatcactatttcctgcacttgctactgacggtaataacaaaattaaagaagtacaggttaataatatttttttctcagtttcataaaatccctcctttaaacataaaaaaggacacacctgtaccttgggaggtacgtaaggtgtgtcctttacgtaaataaatcaaatttatttatttattattatattacatatattaatatatcaaatgaagcatttaattgcaatgatattatacacgtacttgaacgtacatcatgtggtcagctgtagaatgccctacacggatcttatattttcctttttcatagttatttatttcttgagcatctacagtttcttgaatttctttatctagaactaaatcagaatttaacatcgtagtccactttttagctaattcaatagttgcttcgttattatctaagaaaataattttaaaatcattctcactagtagcattaacatagacttgtgccccaattgtaccttctggtaaatacatgtttttatcaattattctaatagttccatttaaatctgcatacttaaggttagtgccatatttagcattcacactcttgataagattttgcgcttctgtagaaatggatttttgagcaatcgggtttttcatagcgtttggattatacgtaacttcttctgtaactaaacctttatctaaacttgatggtaaatttgtatctggtttttcttcaggttttgtttcaggttttggatctggcttcacttctggtttttcttctggtttaggatctggcttcacttctggtttttcttctggttttgggtctggcttcacttctggtttcgattcagcaattgcttaagctgccagcggaatgctttcatcctaaaccaaaagtaaacagtgtcttaataaaacttacccgccataccacagatgttccagataaatattggaagctatatacgtactttgtttcaaaatgggtcaatcgagaatatcgtcaactgtttactaaaaatcagtttcatcaagcaatgaaacacgccaaagtaaacaatttaagtaccattacttatgagcaagtattgtctatttttaatagttatctattatttaacgggaggaaataattctatgagtcgcttttttaaatttggaaagttacacgttactaaagggaatggagataaattattagatatactactgacagcttccaagaagctaaagaggtccctagcgcctacggggaatttggggtacattgaaaaaggaagagtatgagtattcaacatttccgtgtcgcccttattcccttttttgcggcattttgccttcctgtttttgctcacccagaaacgctggtgaaagtaaaagatgctgaagatcagttgggtgcacgagtgggttacatcgaactggatctcaacagcggtaagatccttgagagttttcgccccgaagaacgttttccaatgatgagcacttttaaagttctgctatgtggcgcggtattatcccgtattgacgccgggcaagagcaactcggtcgccgcatacactattctcagaatgacttggttgagtactcaccagtcacagaaaagcatcttacggatggcatgacagtaagagaattatgcagtgctgccataaccatgagtgataacactgcggccaacttacttctgacaacgatcggaggaccgaaggagctaaccgcttttttgcacaacatgggggatcatgtaactcgccttgatcgttgggaaccggagctgaatgaagccataccaaacgacgagcgtgacaccacgatgcctgtagcaatggcaacaacgttgcgcaaactattaactggcgaactacttactctagcttcccggcaacaattaatagactggatggaggcggataaagttgcaggaccacttctgcgctcggcccttccggctggctggtttattgctgataaatctggagccggtgagcgtgggtctcgcggtatcattgcagcactggggccagatggtaagccctcccgtatcgtagttatctacacgacggggagtcaggcaactatggatgaacgaaatagacagatcgctgagataggtgcctcactgattaagcattggtaactgtcagaccaagtttactcatatatactttagattgatttaaaacttcatttttaatttaaaaggatctaggtgaagatcctttttgataatctcatgaccaaaatcccttaacgtgagttttcgttccactgagcgtcagaccccgtagaaaagatcaaaggatcttcttgagatcctttttttctgcgcgtaatctgctgcttgcaaacaaaaaaaccaccgctaccagcggtggtttgtttgccggatcaagagctaccaactctttttccgaaggtaactggcttcagcagagcgcagataccaaatactgttcttctagtgtagccgtagttaggccaccacttcaagaactctgtagcaccgcctacatacctcgctctgctaatcctgttaccagtggctgctgccagtggcgataagtcgtgtcttaccgggttggactcaagacgatagttaccggataaggcgcagcggtcgggctgaacggggggttcgtgcacacagcccagcttggagcgaacgacctacaccgaactgagatacctacagcgtgagctatgagaaagcgccacgcttcccgaagggagaaaggcggacaggtatccggtaagcggcagggtcggaacaggagagcgcacgagggagcttccagggggaaacgcctggtatctttatagtcctgtcgggtttcgccacctctgacttgagcgtcgatttttgtgatgctcgtcaggggggcggagcctatggaaaaacgccagcaacgcggcctttttacggttcctggccttttgctggccttttgctcacatgttctttcctgcgttatcccctgattctgtggataaccgtattaccgcctttgagtgagctgataccgctcgccgcagccgaacgaccgagcgcagcgagtcagtgagcgaggaagcggaagagcgcccaatacgcaaaccgcctctccccgcgcgttggccgattcattaatgcagctggcacgacaggtttcccgactggaaagcgggcagtgagcgcaacgcaattaatgtgagttagctcactcattaggcaccccaggctttacactttatgcttccggctcgtatgttgtgtggaattgtgagcggataacaatttcacacaggaaacagctatgaccatgattacgccaagcttttatttgtatagttcatccatgccatgtgtaatcccagcagctgttacaaactcaagaaggaccatgtggtctctcttttcgttgggatctttcgaaagggcagattgtgtggacaggtaatggttgtctggtaaaaggacagggccatcgccaattggagtattttgttgataatggtctgctagttgaacgcttccatcttcaatgttgtgtctaattttgaagttaactttgattccattcttttgtttgtctgccatgatgtatacattgtgtgagttatagttgtattccaatttgtgtccaagaatgtttccatcttctttaaaatcaataccttttaactcgattctattaacaagggtatcaccttcaaacttgacttcagcacgtgtcttgtagttcccgtcatctttgaaaaatatagttctttcctgtacataaccttcgggcatggcactcttgaaaaagtcatgctgtttcatatgatctgggtatctcgcaaagcattgaacaccataaccgaaagtagtgacaagtgttggccatggaacaggtagttttccagtagtgcaaataaatttaagggtaagttttccgtatgttgcatcaccttcaccctctccactgacagaaaatttgtgcccattaacatcaccatctaattcaacaagaattgggacaactccagtgaaaagttcttctcctttactcattttaataaacctcctttctctagaccccaagaagctaattataacaagacgaactccaattcactgttccttgcattctaaaaccttaaataccagaaaacagctttttcaaagttgttttcaaagttggcgtataacatagtatcgacggagccgattttgaaaccacaattatgatagaatttacaagctataaggttattgtcctgggtttcaagcattagtccatgcaagtttttatgctttgcccattctatagatatattgataagcgcgctgcctatgccttgccccctgaaatccttacatacggcgatatcttctatataaaagatatattatcttatcagtattgtcaatatattcaaggcaatctgcctcctcatcctcttcatcctcttcgtcttggtagctttttaaatatggcgcttcatagagtaattctgtaaaggtccaattctcgttttcatacctcggtataatcttacctatcacctcaaatggaattcactggccgtcgttttacaacgtcgtgactgggaaaaccctggcgttacccaacttaatcgccttgcagcacatccccctttcgccagctggcgtaatagcgaagaggcccgcaccgatcgcccttcccaacagttgcgcagcctgaatggcgaatggcgcctgatgcggtattttctccttacgcatctgtgcggtatttcacaccgcatatggtgcactctcagtacaatctgctctgatgccgcatagttaagccagccccgacacccgccaacacccgctgacgcgccctgacgggcttgtctgctcccggcatccgcttacagacaagctgtgaccgtctccgggagctgcatgtgtcagaggttttcaccgtcatcaccgaaacgcgcgagacgaaagggcctcgtgatacgcctatttttataggttaatgtcatgataataatggtttcttagacgtcaggtggcacttttcggggaaatgtgcgcggaacccctatttgtttatttttctaaatacattcaaatatgtatccgctcatgagacaataaccctgataaatgcttcaataatccatcctccaaagttggagagtgagttttatgtcgcaaatattaatgtttctggtgaaccttatcaaattttcgttgatttaatagaaacatagcggtaaaattagcagtaacttaatagaacggaaatgaaaaaagccactctcatatgctattggctaccaacctttagcgagaatgacttaatcctgtacagccatacaggacttcgacttataagaggcgccaacttcaaataagttatttgccttgttttcgcgaacaaggcttattagatacacctattgtaccgttactctacgaatatttcaactagtaattactagcattgtcatatacataataaaacggatataaaagggcgttttctatacctagaagtcttgtaaatgtacagggcgtttagatatagagaacgccctttttgtgttccgttccagtggaagctaccactttaaaaagatggtctagtgtagccaatgcaggagagtacactcggatatcagttgtcgttgcattcaactgtctgacgtaagcgaggtaaaggacacaagccttgcataaaacaagcctacgggatgtaaatcctaataatgatgataaccaagacgttagcggcaaaaagtgttgggggttcaaaataagacatgattgtgcgactggagttaaacagttactcgtaagcggcgatcatgacactgattcacggctattcttgtacaagctagctttattacaaggatatgcgggttatatagcgaatcacccgaaagggaacggtgttgggcgtgagaaacgcaccgtacggcgcaatacaatgccaataagctatatacggacggtatagtagttttgtaagctataaccgtttgtcgtcaatgcaaccaatctcaattcgagacctcggcatctaagccagtacgaatgagtgggcgttttaacctcgtaaattttcaacaggggttactatgcccaaaactacattcagatttcctaacaaactcgccagtatgaaaaccttaagaccttaaagtcaagggatttgaaggattttaacctcgattagcaaaaaatgtagagtactgaagcaactaccattaactaagatagtgggggattgaggaagaatccagagctgtttaaatcaagtgaaagacaagatgaaattaaaagaatagtgaaagataggggagtggttctctatgagaaaggaaatggctagagaacaaaggcagcggtttattgatctattgttagactttatggtaaagaatcctcatttatttgttaatggtacagaggatgaaagtaataatgttgttacaaaatgtaatagtgatattaaagaggttgcggagtcatatttaactcttttatagtgagagggttaaaactaattaatatgtattaaggcccaatgttggaattattgtatttcactaggcaacctacttactaaaagtaagattatccattagtggatgttataatattgggttttttaacacaataatcatcgcctttcggtgtcgtttgatagaaaagtaaccattagcgatgaaaaagtcaatataaaaagccatccgtaaaaaacggatggcttaccgtacataggatcgttggtagggcggcgtatcctacatctctggtaacttacctagccaatcaaatgcttgagaacggcggttagataagcgcgtggggaacctttcccacctcaaagatcctatatcattattatgttactttctacaggtagtataccatgttcttatattttagtaaactccccgttagcttaacaggtctttgtaagcaattaaacgtccactattcaatcgtctttggattttcgcaggaccgttttttagatcgaacatagttgataagaacaaataaccgcttgggtccaactttatagcaattagtatatggtcatttaaaatctttaccaattcaacgctattaggttctttaggattttgcccgacatagtcggggtgttcaacgatatcttttatgtgcgatgaatatttttcataaataccaggatgttgtttctttacgtgctttataaatccgggaaacatttttacatcgttagaagtgcaagtcaagttatatgtatctataatgatttgtggaagttttgccacaacagttggtttatttacaatcttttttttattagccgtcaaatttctccctcatctcgtctctttatatctttattttatcataaaggagtatttgaaccgtcgcgcgggacaggtttatgatagggatattttattgaataattgatggtataagggactttcatgcttggaaagtggggattatgaattagatgcttgtccacaatatgttccaatgtaattaaaatttatgttcccaccttgaccaaacatcacgtccatacttaaatcgtccctcctttaataggtaaaatattaatttaccttaataaaaaaataatggataatagtattcgtctgaatttatataatcagggggaactattgatgctggggatactatttacagcggcgccatctactgatgtcgtaaaggatttgcaagataaagttatatcattgcaggatcatgaggtagcgtttttgaacaccacgatatctaatatgttgatccccgaagcaaacttaagagtgtgttgatagtgcagtatcttaaaattttgtgtataataggaattgaagttaaattagatgctaaaaatttgtaattaagaaggagggattcgtcatgttggtattccaaatgcgtaatgtagataaaacatctactgttttgaaacagactaaaaacagtgattacgcagataaataaatacgttagattaattcctaccagtgactaatcttatgactttttaaacagataactaaaattacaaacaaatcgtttaacttctgtatttatttacagatgtaatcacttcaggagtaattacatgaacaaaaatataaaatattctcaaaactttttaacgagtgaaaaagtactcaaccaaataataaaacaattgaatttaaaagaaaccgataccgtttacgaaattggaacaggtaaagggcatttaacgacgaaactggctaaaataagtaaacaggtaacgtctattgaattagacagtcatctattcaacttatcgtcagaaaaattaaaactgaacattcgtgtcactttaattcaccaagatattctacagtttcaattccctaacaaacagaggtataaaattgttgggagtattccttaccatttaagcacacaaattattaaaaaagtggtttttgaaagccatgcgtctgacatctatctgattgttgaagaaggattctacaagcgtaccttggatattcaccgaacactagggttgctcttgcacactcaagtctcgattcagcaattgcttaagctgccagcggaatgctttcatcctaaaccaaaagcttcttgatgttgcctaacttttttcaaaatgtcctttacaaagggtacagattatattaagaggactttttttctatttcccttatttttttccgcaactgtttgccaagtgaacatgctcattaaaaatgttgttgttaatttgtttttcatatttctttaattcttcattgattttactgccagttttactttcaaaacttttctctaatttagctgctatatctcttagacttgtttgtaattcatgaaatgcccctatgtttttttgaagagcatatgtatcttcttttataatatctattgatttaaaccctacttctgtttttaacatcatacgctgcatttctctttcaatctgttttttagcagcttgtaactcctcaacaacctgactcgctaaatctcctgtcacattttcgatttgcttttctatctttttaatttcccccataaaatccatcatataattatctccttatctaaactgaaaattccccgctaaatgattatctttatccctaagtgaatttgctgcatcactaatttcatccccaaatctacttaaacttttttgttcttttcttaaaagatgaattaattcttctgctatgtgtacatcgtgaaaatagtcatttccaccttctttcgttttggcaattcgtgagatggcttcatctatttcgtatgcttctaatagatgatatttcccacctggtcctgtttcatattttaattgacttttcaacttttgaaccgcttcagcttctcttctttgaaactcttctatattttttgctatatctaataatcgattactgagcatttgaattttttgtgcttgtcttataatatcctcaggttctaattttaatagggggcttccatttgaatgaaatgctcctctaaatgtatctctgccgtgtccgtccatagttaaacgtgtaaaaaaatcttcttttgtatcattctgtctcactgtaaattgcttaccaattagaggtgcaccgaattgagtatggttaccaattgggtcattctcatgtgtataatccgtagctttgttttccatttcccctctatctactcgttttttcgcttcaggacttagcaaacgataaggatttggtgcagcccatgtagttgcataacaatctaattctgcagcgataaggtccgcttctgcaccacctttactatgtccagtagtatgaagagaagaagggttatattttgctacgatgtcattttttgcccattttaatccagtatcaaatgatgtttcagaattaggttttatagtttgactattacttggagtaattactttagaatgtgttttaattccaaacgaaatctgatcgatatctgtttcgaaatctgctaattgcgtaggctctgtaccgcgaaatgctaggattatctcatcataatgtgttgcattttctttgtaatcttttttcggtactactgcaatagcttctaatccattttttactttttgacaatctgcatcaattgattctataactacccatatcttaccatctaccccttttatttctttacctttttttaaaacttcgtcatcataaacatgatctgctaatttgaaataatcttcatccgttgcaataggattctttttaaattcactcatatctttcaactcatttcatggtatattttaactatattcaaatacaaggggattttttatgaagaaaaaattagtaattattttatccattatttgtattatagcaggaggatattttactatggaatacttaaaacaaaaagaaaaagaagaaaagttttggaaggcacaagaggcacgagtagaaaagtatattcattacaatattcaagatgtaaaatcgattacatttaaagaacacagtgtaagtccaatgggtgttcccagattaaaaggttatataaataataatgaagaattggattttatagcttatattagtactacagaaaatttcgaagatgattttacacgttctggagaacttggaaaacttataaaagaccctgaaaagtcggtatctgaaattgaaaaagaagagaaggaaaagaaacaagagtagtctttgtgattactcttgttttttattatagaaaaataaaatatttgaaagtttttaacaatgcattataatatatttagtaaaattaaccaatttatattttgctcattatgtattaaaggggaaatgaaaatggctggacaaattcgtatgtcaccagaggagcttaaatcgaaagcgactcgatatggacaaagtgcaaatcaaattgaggacattttacgtcaactacaaaacttacaaaatgaattaagaggagaatgggaaggccgtgcatttgaaggttttgaccaacagttcaatgaattaaagccaaaagtacaaaactttgcacagctattacaagaaattaatatgcagcttaataaaactgcagaggctgttgcttctcatgatgaagaattatcacgtaatttcggtttgaaataagaaatgttgtaatttctacatgaaattcttggaaaatgatagaaagtagactagtattcataagtttacattcgaagatacataataaaaaacagtagtgattttatacactactgtttttttattgtttcttgcaagtgaattatttatattcctgtctatataatttaaacgaataaatagctccaataaaaaatacaaaagcttcaaataatataaagatttgacggaaattctcaatatctttaccaactaaagaaataaatatagcattcattagaatttgagtagtaaacatacgagaagtaatttttaaataaatagcatttgttctttcatctggtttaccaatttttttgtaaataataataagtgcaattactgaacccaaaaatagaagtgctgtaagtcctacaacgatattaaaattggctgtactttctaacatccatttatttaatagatcaatcattattatcttcctttcctacataagagaatatttcgttcttctttttcactataataaaaaaagaaaaaggaaaacatcgaactttcttacaaacattcgtgtattcttacagttttgtcattttgtaaatgtattcatcgccttgcctttcactattttctttggaaaacatagtgaattacgagaaagagcgctacaagatcaacttccaagaagtagtgcactaaaactcttaattaatgcaattagtttgttttaaagtagtaagtggacaatacttcttagttgtagaaagtatcgagatccctgtgccaattccagcgtttgctgcagctctattaattggtttaggaataatcccgctttgttcttaatttaaggaattacaaacagttctacctttcaattgataagccctcaagtgtatgaatgcttggaggttgcttataaaaaaaaagacgccataaggcgcccccacaattgggtagataagactttagttttccaatctaaagaagttttgtatcagctctttgagagtatatcataatattcggttcatttattatgcatttttacatacctattaaaatacctctattttccatttgataaagtatattaccaaaattcaaataaatatttctgaaaattcaaaatatttacaaaaatcacaaaagtgatacatttaaggtgcaagttataaaaaactattaaagggggatttattatgttcaagaaattagtagttggagcattagcagctggtatcgcattaacaggggggatcggggctgcgtcggcaagtacagaagatacaacaaattcaaaaagcctaacgatggcgtattcctgtcctgattatattggtaatggtaaatatgcacaaactatttataacccaggtggaacaaatgctgtttatgcaaacacatatactgaaatgacttgtcacggaaaaataaagtggtattttaaatggaaaaaagcagacggtggcggttactacgaaggagaggtaataaaataagtttttatgaaaagcctcaatatctgaggcttttttctttgtataggattatccctcataaaaaaagacacccaaaggtgccttccgacttgaaccgctttaattttaataatatgtattggactctcatccaaatattattttactatgttaagtattattggtcattgagaaaaaataaaattactcataagagtgcttattcttcaatctaatgttttttactagattttttatgtcctttatttcgttcacaagccacgccatctccatcacgatctaaatgcgaagcataagctgggctatctggagttatatcatagtaaccggcattatttgcatctgtacagtttgcaaagtgtactttctcttgctgaggtgctgtattagctgcagctttttgttgctcctgttcttttgcttcacctgcttcttgttgtttcttttgttcttcctgttgtctttgagcctcttcttgtttgcgttgttcatctaatcgcttttgctcttcagcctgtttttgttcctcagcttgcttttgttcttctaacttcttttgttcctcagcttgcttttgttcttctaacttcttttgttcctcagcttgtttttgttcttcggcttttttctgttcttctattttcttttgttcctcttcctgtttttgctcatctatcttcttttgtttatcttcttttttagtttcttgttttggttcttctgatgtatttgctttatcatttgaaccacaagcagccaatcccataagtaacacgctgcatgctaaagccattaataattttttgcgcataatttaattcctccaagatatatataatgtaatatttctggacaatcttatcaaaataaacatctgtatattgtcatatcgtgtcgaatgagaataaaaaagatagccataactctcaatggaaaaatgataagaatttaccgatggatattagagcaatatcctctattttttactaatattaaataatagtttttatcaaatctatcgggagatgtggttttaatgtggggtaggggtgtgtatcaaaaggtgtaccttttgggaatgttaaattttatatttttataaacttaataccatattaaggtgatagtagattgtaagagtgataataggtgtagatttaaaataaaattcgattatttataataaagatagataatttgtaataaagattgataaaagaacctgtgttgatatgatcttagggtcatccaaattacgtgacctcattgataaaaataaataggttaatcattcgacacttttattgaaaggagagagaattatgttttttatagcatatttgcctatttttttgtacttattattagaattttatagaagttcacctgttaaagaagaaaaacaaaatagtggttctagtttttttatcggagcagttttagccttgatgataaccattccagagattatgtatttctttacaataaataaggttaattcatttctgttttttggtgttattgttgggctaattggtgtatggattagattttcttcaatgaatacattagggcgattttacagtaggaacgtcggaatgcagggagaacataagttaattcaaagcggtctgtataaatatattcgccatcctggttatttaggttcttttctgacctttttagggtttgctatatcttcatcttcgttcattgccattatcataaatatctttttattttttcttgcgtattcgtatcgtataaaagttgaagagagaacccttgttacactatttggtgaacaatataaacaatatcagtccaagacttggcgaattattccgtttctatactagaaattataggagaaagttcaaaataagttactaaagtcatttttccttattcagctaacgggtgcgttagttccaaaaaataagatgattcccttgtatttttacactcctttaaataatctaaacctatgttatttaacatctattatattagaaaattgcagttttatcttgttataaaaagcatcggtacataaaacagcgctatttggtggatcaatattaacaacagtcatatagctagagagtaaatagccatcttcataatatgtaattagtatttcttcttcagataataaggaacataacaacatgttctcaatcagttctttttcttcagcggttgagattggacggggtaccctatacgtttcttaattattttaattgtactagaaattgtgaataaaaaaagagagccgaagccctctataataactactaataaccatggtcactactctcatggtaatatgaatttgattcaccacaacaaatacatgttgtttgttggataaataatggactaagttcagcgttagctgtagtggcatttgagaaagtaatactttgaacatcctcaaataagaaagtttttctatctcctggtgttaatgtaattgtttgtggggttgtggaattaaatgttctaatagtcaatgtaacaaacgaagcaaatacagggctaaaactaaaacgaattagagttttattgtgattagttgtaaaattttcaaatagggtaattgtagaaccgggtgggatttcaagacttgtgggggtagtttcagatccaaaaattgtaaatgtctctatgaaacagttactggagtttgaagagttacatgatttatcttttttcttgtaatatttctttccatctttacagaaataatctgccatatctaatcattcctctcaaaaaagagtttaaggttgtcccatattatattatgaaggttgtataaaaaggttctagtttaaaaagagtaaaaaaaaagagagccgaagccctcattggataaattggtaatttttttgaaaaacggccttgctgccgtccgtctagcccctcataagctcgttggatgtcgttgcaaaatttgaaacttattgctaatcataaaaaagacacccaaaggtgccttcctccgacttgaaccgctttaattttaataatatgtattggaatctcatcaaaatagtattttactacgttaattaatattgatcattgagaaaaaataaaagcactctttcgagtgcctattttatttagatacagtagctttatctttacggaagatacccattaatcttccgatatcagtaacagtcattattaatgaagttttattaatgaatttaaccagcatttttatgtgaatcagcacatgtgagtggatttgattttggaaagaagaaagggacactctatattcagttagctatggaagaactcatgaatcaattgtcccctgttcaaacaatggagatttcagaggcacacattggacagtatcaaaaattaccagctcgtgttattattcatcgattaacaaaagaacaaacagagaaaaggttgaaggaacaagcaaaaaaagaaaagaagaaaggtattgcctacaaagaacgaagtaaacggttgagtgggatcaacgtgtatattacgagtctttctacagaaaatgttccaacggaacatatccatgacttgtattcattacgctggcaaattggcgtgtccagataaggacacattatctagttggtgaaagtccaatcgggagaatgtccagatgatattttaactcgtgaacaaatggcacaagtgcttacaaatgcttttaaatttaaggcaacgaaaacaacaaaatttgcagatgttgataaaaattcttggtcttacggtgcaattagtgcattagaggaaaatggggttacaattggtactggaggtaatatgtattctccaaaaatgtttgtaacacgtgaagcgtatagtcagttcttatataactctattaatgcagttgaaaaagaaacaaaaccagagccaaagccagagacaaaaccaggggtaacgccaataggtattcccaatgcgttagtgacagatgattttttctttgatagatattcaattgaaatttcatctgtaagagagcgatctatttctaaacaaggtcaaaatcttgttactgaagtaaataagaagtataatgcgaatttcagatatagatatgtagcatcagaaattgatctatatactcctaatttaccaagaatgattgactctcatggttcattttcgtttgttgggaaggatgaagataacttctatttcatgtttgtcgttgacaaatcaactgttgagctagcgaaaaactggatgcatatgataaatccgaatttcactcttgataaagagattgatagattagtaaatccaaatccagaattaaaaaaagaaattgatagttttgtaaaaaatgataaggattatatcaatcgttttgaaaaagataatcatagcgtagaattaaatgtaagtcctctacagtgggtaaaacctggggagtctgtagttactctacatccagattactatgtattaggaatttctgtacaaggaaagtaatatttaagtagtgtattgattttcgtacagtgaaggatagacaatattagggcttattgattttttgaaaaagacctactgttattgaagtgcaccccaattgttagacacataattaacaattagaggtgcattttttttatatgttttaactgtatagattttttaaacaatagatactatttcatttcttttgctttaaagatggagcactctctttttctcgtcagcgtttgaaccaacaattaaaacatcttaattcctttagcaaggcttgtaaaattccaaaagttcaacaggaatattatttttgtatgctatacatgcttttgtatcaccacgctgaatggtcttttggtcaattaacaaaagcgcagcaaacgtatttgcttctatctctaatttatcaacggaaaagaatgtattcttacgcagaaaaggtgtatttgcatgagtatgtagaaccgcgtgtcctaattcatgggcacaaacagttctctgcatagatggagataaattagtattaataacaatgaaacgatttcttttttcatatttataaaaaccatttatttcttcatgtaaatcccatgttagtacatgtatttttaagtaatctgcaagctcatagggatttttcgtgttgtatttggtgcaaagttgttggactagatctctaatgacgaatttcaatgttttccctcctaagcttgcatcagttatcgtctggattacgatatttcttaggcacgtattttttattgattacttttgtttgttttacaatgtactccatcgcatctaataatgactctaccgcttcttgactcataggttcaccagagaacattaagccatcttcgccttgtagatctttctttatttcttccattctttttgctatatctttctcatcttttggcgttacttgttcgtttggttcgcctgtaacagatcgaccaagtaaatagtcagctgaaactgaaaagcaatcagctaatttagttaaaacatcatgtggagggaacctctcttctgattcgtagtaacctatcattctttgggatacgccgattttttctgccagttgtttttgagttaaattctctttttttcgtaaggattttattctaagtcctatcacatcgttcacctctctaattgaactaattgttctctttgaattcattttagcacaaaaagttcttttatgcattgacaaagaacaattggttctttaatctgtatttagaactaattgttcttatggaggtgtgataatgggaaataaaatgtacgatccgaaaaaaaacttatataaagaaattgctagctattgcggagtaactgaacgctatattcgaatgattgatcaaaaagaaagaacgccatcaatggagacagctaggaagattgcacagttttttgataagagtgtagatgatattttttttagtaataaatcgaactttaagttctttttaaccgcactttggtttaaaaagtgtggaaagtagattttgtcatggagaagttaagagttgcaataagtaagtaaaaaaggtttgaaaatatgagaggtagataatatggggattttccgagtaaaaaaagataataattattccgttattaataataccggtctaaaggataagaggctttcttggaaggcgaaaggaatattagcttacatacttacacttccagatgattgggtgttttatagagaagaattatcgcaacatgcaaaagacggtattaatagcttaagagctggaatgcaggaattaaaagagtacggatatattagaagatttcctgttagagatgaaaaaaacaaaattgttaggtgggagacaattatttacgaaatcccagtggatgattatccaccagtggaaaacccacctgctggaaaacctgttgctggtaacctaccggtggataatcacaagctactaaatactaatatacaaagtacgaaagaactaaatactaatatacaaagtacgaaagaactaaatactaatatacaaaatataaatcatattcatgataataaacaaagtttactctcaaaaaaattaacaaatgaagattttaaaataagtcatcaatttttgatgaagaatagaatttcattaagtgaaatagcaattatagagcttggtgcattttgtgaatcactaggtagtgaactaattggggaagcagtaaatagatcaattgatgaaaatgtaccaaagtggagatatgtacgtgggattcttaaaaattgggaagcaaaaaaggtaaaaacactcaaggatgtagctatgctagatgcacagtttgatcttggtaagaataaaaaacaatttgggtcagggaataccaatcgaaatgaaatggtaccagaatggttacatgaaaaagaagatattccagaagagcagcctataaaaaataatgagttaactattgaagaagagcgtgagagattaaaaactttattaaaaaaatataaatcataattaatatttataaattttattaaattgataataaggttagattatctttggtgataaaaataaaagcagcatttaaataaagaaaagtagggggattattatatgtttgactggctcaaagattatcagaaactagaagaagaaattgcatatttagaatataacttagacaaatcaaaagcagaattaaagcgctggactagtggggacttgcaaaatatacgattaactgctgaatcggaaggggctaaagtagaagatcggattgaagctattgaatatgaattaggacataagatgaatgaagtatttgatttaaagattttaattaataagtttacaggattagatcatcaaatactcaaaatgaagtatattgatggaatgaccttagaacaaatagcgtttgacttgcattatagtacaggctatatccgacgcaaacatgctgaaataagaaagattgtcaagtttgtagatgggttttaatgttacctttttgtaggatacatgcagtgtacagaaagtattgaaaaagtgatttatagtagtaatataagatttcgacgaaagggcaactatttttatggttgctctttttgttgtgaaagaaggtgagcaacatgaagtaattttaaaaaataattttcatttaagtgttagaggtacttagtagattaagagttttatagaaaaaataataggaaaataaggagagatttagtaatgagtatattagctgcttcagttaaaacaaagaatctgccacaacaagtgttacgttggcaatcaatggtagaaagtgaatgttcagcacaaggtgtgtctgaattagttccctatgtacttgggattattatggtggagagtggaggaaactctgaaacaacacctgatattatgcagtccagtgaatcacaaggttgggcgatgaatacaattaaaaatcctaaagattcaatttattatggagtaaagcatctaaaaggagcttttgatgatgcaaagaaaaatggcattacagatttaagtgccattgttcaatcatataattttggacgagcttaccttcgctggttagcttctaacaataaacaacattcattaccggtggcagatcagtattctaaaacggttgttgcgccatcacttggtaatacaactggtgctatggtcaagtatagtcagcctattgctgttgcatataatggtggctatcgatataaaaatggagggaatttcttctactctgaaattgttaaacaatatgtagattttgatgaagctggtaataacaataaaccaatacaaccggtgggcttggggattgctgtaaataaatatccgaataacggtggtattaatctatatagccaaccacaaggtggacattttacgagagtaatttatgataaaacaccgtaccttattatagatgcagcatggtttgaaaatcctatgatttgtctcggaaacgaggcatgggctgctctggaacatttcgatgtgcaatggttcagtgcttattcaaaatatccaccaggtggcggtattaacacgtatgatggtcctaacggaaattatacaggttttgtagatgggtctgttccatatagacttttaggacgaaaagatggttatttggcgattggaaataatgcatgggtaaaagaagaacattttgatgttagataataacggggagcttttcgttcggttaatcttaagatttgaaaagctaaaatacatccaaaaaataataaatatagacagtgaacgaaggtgctcattcaagcaccttttttatattgtgtaaaaatagaaaggaagactaatatggcaaaatttatttatcctacagatacaacaagagtaacaagtggttttagaggaagtagaccagatcatcatggggtagaccttgctgaagcgggctatcatccgatttatgcagcagctagcgggcaggttagccgttcttatctttcatctagttatggtgaatgtattatgattgtgcatactattgatggagttacatgggaaactgtatacgctcatatgcgtagtggttctcgaacagtaaaagtaggcgattatgttacacaaggacaaactattggggttatggggaacacaggggagtctagtggccaacacttacattttgaattgcataaagggcgctgggatgctagtaagagtaatgctgtgaatccactagattatttggggaaaggtgacagtggcaacaatactgataaaccgatacaaccagtaggtcttggaattgctgtaaataaatatccaaataatgggggtgttaatctatatagccaaccacaaggtggacattttacgagagtaatttatgataaaacaccgtaccttattatagatgcagcatggtttgaaaatcctatgatttgtctcggaaacgaggcatgggctgctctggaacatttcgatgtgcaatggttcagtgcttattcaaaatatccaccaggtggcggtattaatacgtatgatggtcctaacggaaattatacaggttttgtagatgggtctgttccgtatagacttttaggacgaaaagatggttacctgggtattggaaataatgcatgggtaaaagaagaacattttaatgtgagatagtattttgaaatctataaatatcaaattaaatggaagaagcagtgtgatacttttttatgaattcgtttaaaacgatggtgtaggagtgtagagaggaattaaaggaagagcaactgataaacagttgctctttttcttttttagcaggtgaagacaaggaatttattagagaaaatgctggccgtatggagattaggttactagatgtactaaataatgcagtgagaattttaagtaataaaaacgagagaataaaaaggagatgttcagtaatggagattagaaaaaaattagtggattcaagtaaatatgctataaaatgtcccaatgcaatgaagccagaattcatcacagtacataatacgtacaatgatgcatcagctgaaaatgaaatttcttatatgattggaaataataatgcagtttcgttccatgttgcagtagatgacaaagaagcagtacaaggtattccgtttgatcgtaatgcttggcatgctggtgatggtaacggaaatggtaatcgtaaatccatcggagtggaaatttgctattctttaagcggtggggatagatattataaggcggaagataatgcagcaattgttatagctcagttaatgaaacaattcaacattccaattagtaatgtacgtacacataaatcgtggagtgggaaacattgtccacaccgtatgcttgacgagggaagattggatcaattcattgagaaggtaaataaagcatttaacaacaataataataaaccaatacagccagtaggtctggggattgctgtaaataaatatccgaataatggagggattaatctatatagccaaccgcaaggaggatattttacgagggtgatttatgataaaacaccgtatcttattatagatgcagcgtggtatgaaaatcctatgatttgtctcggaaacgaggcatgggctgctctggaacatttcgatgtgcaatggttcagtgcttattcaaaatatccaccaggtggcggtattaacacgtatgatggtcctaacggaaattatacaggttttgtagatgggtctgttccatatagacttttaggacgaaaagatggttatttggcgattggaaataatgcatgggtaaaagaagaacattttgatgtgagataaggttaaagaattagagtcactcgtatgagtggctatttaatttttggattggagtatgattggaaatagaaaatgtcagtagtgttctatactaagttgtttttatgtatcgattcaagaataaaaggagtagtttagtgcgtaatttgtttatgttgaattaaataagaagtaggaaagaggtggtaaaatggatagtttacaagaggtgaagggtgatgttcaggaaataaggcaagatattaaggaaatacgattagagattagaagtttagaaatgcggacgacaggtaatgaaaaggacattattaatattaataagcaattagacaaaatcagtgctaatacaacttggatcctacgccttattattggtggactaattggagctgctcttaccttctttttgaaagaccaactatgagaagtcaaggggagttttttatataaatagggggtgttttatacaacgatagaggcattaatatcgctacaataatcgaaaaaaagtcttgataatatggtgaaattcactccgtttgcagcaattcctgaacagtttgctgggatacgtgaaatcatcaaggagaaaaataaagtaactcggccgatcttaacagatgaagaaaaagaactaattgagaacatgttattatgttccttattatctgaagaagaaatactcattacatattatgaggatggttatttgctctctagctatatgactgttgttgatattgatccaccaaatagtgctgttatatgtaccgatgctttttataacgagatgaaactgcaattttataatataatagatgcaaaatagaatatatttacttaagcacatttagaccattataaaggagtgtaaataatgcaagaggctcaaataagaaaaagtgcagcaggagcaattattcataacgatataaatgactatccctatttaaatataccgatgattattaatgaaaaagatggaatgatttatgaagttctaggtgctggttttcacactaatgatgctgtagcaataataacaacggatgattttgctacaaccagggtaactgcgcctcttataacagtaaaaaacaatgatggtagtattcaattatatcgcttacctttagaactagaacattgggtactttcttgtatgcgtgctgcttcagtaggaaaaaatccgtttccctgtaaagttgctttcggaatcatcgatactaaattttatgtagaatttatataaaaaaggtctgcttattcagcagacctaccatcaattatagctttatatttttttccttttcaatgtccaaataggtgtagaagcaaggatctggattggctcaggtaataacggtcttactttcttcccatctcgttgtcgagaaaactttgtgcttaaacgtgctttatcccaacctagtatctcagcaaattcttttaaaccaacgagaaggggaattactcccccagttcatcgctccacacttgataaaagccgccaccaaccgtttcaagtacattatcatcctcttgtggggatattccataccaatatgaggttgttatgacttcgccatctaaagtttcaattgtgattttttcttgcgtgtaagctataccttcttcagcaacttttttcgcttcacttaaatcatttacttcaacttcttctgttacaccagtatgatagtttacaatgtatttttccatttataatatccccttcaaaagtgataactttgttaacactttttaggataattcatttaattatttccttccttttaggaaagagaaaatccatagcttctacagttaaaatccattctccacgttgttttccttcaggcttgtagtatttaacttttccactctcaatcaatgcatctattaatttattatcttttcctcgcttcaatttcattagcagcgcttcttgtataatcccccaacgatcacacgcctctcttggtggcataatttcatctagcataaataacatccccatcacctctcgttacctataagtaacgttcaaccggataaaaaaacatgatgaattctacatgcgtgtgattggaaccataactttgcccaaacggcaaggttatggttctttttgtttgtggcaaagttatggttccaaaaataaaatgtacaatcaacttaataacaagttgccccaaaaacgataaaaatgaactccattgttataaaggaatctaattttttgttttgggggtagtatagaatattaacttgattgtgatgtggcgctaagcttataagggatcactatatttaaaaaaattgtacgtttagacacggtttggcaaaaaactaactgttttcttgtacattaataaaaactacagtaaaagttgtagtttttatgttttcattttcctttttgcattcatcttttacttagatgaatgctttttttagtacataataaaaaaaaacggaaaaagtgtcacaaaatccgtttttctggtttctatataatacaggcatcaaattgagagtgaggttttaactaacatgttaacaatagaaaatgaagaaagtcatgcttctgacatgacttttgaagatttatttaagcagtactatgcttacgctgtgaaacaaatcatatggattgttaaagatcaatctatcgctgaagagttagcgcaagaagtatttttacaattatatcgtagcgattggaaagcaatcgaaaacatacctggatggctgattaaatcttctacttatgtagcgtataaccatttgcgatctgaaaaaaggcatcaagcgaagattgataaggaaatacaataccatgacgtacaaaatgtctcatcattagacgatgattggataagaaaagaagaaattacaaaagtccaaacgatactaaataaaatgaatgagcgagaacgaacccttttactaatgaaattctctggttttcaatataaagaagttgcagaaatacttcaaattgaaatatcttctattggaactttattagtccgagccaaaatgaaatttcgcaagatttataaacaaatggaggaggcataacaaatgaaatgttatgatatcggatttattcaaacatatattgatggagaactttctcatgatacaagaaaagaatttacaaagcacctagatacatgtgaagcatgccaagatttattagtagaaatcagtaaattaaaccaatgggagaatgtaatgctatatgaagaatctgcacattcaccacaagaaatcaaaattgacgtagaacaagcatggaaaacatttgaaagtcgttcaaaactagacaatgtttctaatataaatcataaaaaacaacaaaagaagggaatttttacaaacatgaataaaaaaacaaaacgtttcatttatacagcagtagctgcagcaggactatttacaacagcaatgattccacaagtacaagtggcggctacaaatgttgcctcgtatttttctgatgcaattacaaatgataaggttgtaaatgaaggaatacaagacgaaaatggtgtcacacaagatacgatgaagaatggcaaatatattcctattgatgaaaaaattacagatcagggtattacagtacatttcaaagaattatatatcgcggattcacgtatatcagttcattatagaatggaaaaagcagatggaagtttagtaccatatgaatttgatacagctggagtagatcttaagagtgatggtaaggtcaatggacaacaagaggaacgacctgaacttaaaaatggatcattaatatcctttatacaagataaagatgattatcttcctttcgaacttatggcaacaggtaaaaaattagaaacaggcattcgtgataaagataaaccagaaggcgttgttacatttgttgtaaatcctgaagaaaaagacgcttttaaacaaccccttacattagatgtaaatataaataaaattggaaaagtagctggatcttggaaaggtaagattcaaattgatacttcacatttaaagaataaaaccaattaacatgaaaaaaagaatagcacaatatgtatctaatgctcggtttatatgttttcttgtttttgttacatttatttcttatatagttttcactctatcttttatttatgatttaagtttataaacttaaattaatcatttaaaacattataagataaaaacttcataaaaaagctgtaaaatcaatagccggttccttaatgtataaggaaccggttagtttgtgtctaaacgtacaatttttttgatatggtgacccctactaggggtagcgtcaggaaaatgcggatttacaacgttaaggaaattcccttattaaaaagcctaatttctcaacatttatattgagaaattaggcttttttcgttgctccgttaaagcgccctattttggaagatcaagataataattactgccaatagataattgaactaatgctcccgattatggagcaaatcactatcaaatccttcctttttgttcattatatatactccaaataaaatgatgatcatggcactccaatcacttatcaaaatgatttcgtttgctaatagtgcgccgattaataaggatattacaggtggtatataagttactgtggaggctattattgcccctaaattattgacgagaacataataaagaatgtaagctagccctgttcctagaactcctagtcccactaatacaccaatcaacgcaactgagtctgattgaatattctctatactttgtaaatccccaaagagaccaagtataatgattgcaatggccacctggtaactcgttaaagctgcgggagaaatattgatttttgttaaatatttttttgcatatacaaaagaggcaccaacactgagagaccctattaacatatatatgacacctttaacgtcaagagctgtatctccgtttttccatggtctcgcaataagtaacacaccaattaatcctacaataactccgactactcttttaacagttaccttttcttcttttaaaacaaagaaggtcatgattgtagaaaaaatcggtatggacccacttaaagccccagctattccagaattcaacaatgctgtgcctttcgcaaaacaataatagtaaatgatagttgcgaggatagacataattagaaagtggtgtatatattttatatgacttaactttatttgacgtttaataagtgcataaagaaatacaggaataaaaccggctaaaactcttagaaacacaatttgtaaaggatcaatatgaacggcggcccatttcataaaaagaaaattagtgccccaaataaccccgagtgttagataagctatataataaacgttgaatttcatttgtgtctttagcactttttactcccctttcacacttcccttttttcttctttttttgtataagaggaagacgataagaagtttaatgtttcatgtaattgatcagctgcataaaaagcttcctggtctttggatatatctccaggtttatttcctttcccaataatatatccttcaaaaggtagaccaacaaagtcaaagatgtagttgaattgctgaattaatggtaatccttttataaaaggagaatctcccccaactgcaactacataggcctttttcttagacatgatttttcgaaagtctttatattgaggatctctcatcgtttgggaccatcgatcaataaagttcttcattgttcctgtcatactgtaccaataaatcggtgtcgaaaatatgagaatatcgtggtgcaccattcgatatattagggagttataatcatcaccaacatcttgaaagccgtcttcagtgtggcgcatatcatctattggtttaatattgtaatcccttaagtaaatggaatctacttcgagatccttaatagaacgtttagttaacgtctctgtatttccatttgggcgagtacctccgtaaataactgcaatactcataattattccactccttttttttgactgtttatgatttatagcttaaactacacatataaatcagtaaaacagattattccgtttggttcaatcgatatttccgatttaggagggagacgaatatggatattaaacaactcatcacttttaagacggctaccgaaactcttaatttcaccaaaacagctagtatattaaactttgctcaatctagtgtgacagcccaaattaaagcattagaagaagagctagaaaaacctttatttgaacgcttaggtaaacgcctaacattaaccgaggcaggaaaagaatttaaaatctatgcggaaaaaatcattaaactaaatgaagaagcaaaaatggccatcagtggaaataaagaaccttctggcacccttatcatcggagcacaagaaagtcaatgtacttataggttacctaccatattaaaagaatttaaagatcgataccctaatgtaaagttaatatttaaaccagctcattccgacgagttagctagaaagcaactaatgaatggtatgcttgatattgccttcattatggatataacgaaacctgaagaagctttaacgataaaacctttgatacaagaagatatcaagatggtggctgctccaaaccatccattagcttcgaagtcagaggtttatcttaaagatattgagcatgaaacactgctattaaccgaaagtggttgctcctaccgtactcttttagaaaagtcttgtcactcagcaaaagtctacccagtaaataagtttgaatttggtagtatcgaagccataaagcaatgtgtgattgcaggattaggaattgctgcattacctacaatggttgttgaaaaagatattaaaatggggagaatggtggaattaaaatgggataataatattcctcctattttcacccatatcgcttggcataaggataaatggatgactcctccattggaagattttattgaattaactcaaagaactttcaacagacacaagatttaaacataaaaaatcgctaagagtttgttaaacctagcaattttttcatgttaaccagaataatcacttactggaaaaaagaagcatcaaaaataataaaactctaaggctatcccttgccttagagttttattctatcttattcaattatcgggtgcttagtttaaatacactttttacaaactctatctaattttatcataaacttccttaatcattccttactccattatatggcccttaatggaataaggaacgattattgtttctcttccgacagctttctatatatggggaaattaggtcttagctacagccttacgcgaaatgggaagaatagaaaaaacgatctttattcttaattacatatcggatgaaactttaagaagaaaaatacaaagaggattgaataaaggagaagcgatgaatggactggcaagagctattttcttcggaaaacaaggagagcttagggaacgaaccatacagcatcaattgcaaagagccagtgctttaaacataattatcaatgctatcagtatctggaataccctacatctaacaaaagcagttgaatatcaaaaagagacaggtagttttaatgaagacttattgcaccatatgtcacctttaggctgggaacatattaatttactaggagaatatcattttaattcggagaaagtgatctcattagattctttaagaccactacaactttcttaacgttgttaaaaatgggggaatcgtcttggaaaagagcttagcgttgtaaatccgcattttcctgatactaccccatgcccatcaacttaagaatttgcactacccccaagtgtcaaaaaacgttattcgtgaaggcgataacattattacgatagaaaaaattaataatggtcttccttatattactaatattgatgcttttcaacgatggaatgaaaaaggtaaacataaatttggtttttatagtccagaaactgacaatgaaaacatgtctcctgaccgtttgaaaactttaatggaaatagaaatgaagaaacgtgtaaatgcgtctgtttcttatgaggtaaaagcggcatccataggacgtgtatttggattagcacatgaattgattaatgagggtgacacaatccgaattaaagatacaggatttacaccaaaactttatttagaagcaagagcaatagctggagacgaatcttttactgatcctacacaagatcaatatgtatttggagattatcgagaaattgtagatcctaacgaagaattacgaaagatttacaatcaaattcttagttcgttaggtagtaaacaagaaatgctagatcagctagacaaactggtgaaagagaatgaaaaaacaattgaaaccatacgaaaagaatctcaagcagctaaagagttagcagaaaaagttcaagaaaatctaaaaaataatacggtaaatattattgaagctaaaaacccaccaattgataatcttatagtaggtaaaacattatggcgagatattagtaacggtaaacctggtatgttaaaagtgtggaatggtaaagggtgggagcttcttattcctgatgtggaatcaattaaaaaagatacactggagcaggttaataaggatattaaacttacaaaagaagaattaaataagaaagtggaagaagcgcaagaagaagccactgggcaatttaatcaagtaacagaaagccttcaaaaagttacgagaactatttctgatgtacaaagagatcaaggtgaaattgataaaaaagtaaccaagtttgaacaggattctgagggatttaaaacttctattgaaacattaacgaaaaatagtactgatactacaagtaaaatcaacaccttagtaaatgatgtggacggaaataagagagttatttctgaagttaaagaaagtgtagcaaacattaatgacgatgtaagaaacttgttaatcggttccaaatcttttgatggtgctttgacctctgcgcaagcggacaatcgttggtggcttaagtcagcagataaagtcaaaatttcgaaggatgtttttcaagggaatacagtcgtagaaactcaatcatcatggaccgctttagcttataacttcaaagatttagtagatcgaaaagttgtaaaagtaggagataaagtaacctattcaatttttactcgtgtaaaaggtttaccgaacggccaagacttacaacacactttctattttgcagcaggggctaccggcatccgtccaaataaatctactaatcaatggcaaagtgtaagtgtttcgttcgtagtgacagcgggcatgatggcatcaacaggaacggataacgagagtcattttcgtgtagaacctgacgtgaatcctcctgctggttgttggtatcagcaaagttcaccacaattgactataggtagcaaaggatattcttggcggccagctcctgaagatcttgcagatgggaatgttttaaccaaggtaacaacagagatcaaagaagcagcagggaagattagtgaaaagttaacaagagtagaaacaaaggttaataatgataaatctggaggacgtaatctgttattagattcaaatgctaaatacgaaaaaacagattatctaatcaatccatattctctaactgaaaattttgttgcaggtgaggaatatacttttgtaattaaaggaagtgtcccgcagggtcaacaatttggaatttggcagaatggtggttcaaataatgttggatatgcaacaagtgtctatgctaacggaataacttatgtaactttcaaagctgttgcaactacaagtgggaatgaacggagattaaacttatataattatccaaataatgctacaaaggcaactgtagaatgggtggctttatataaagggaataagccacaggattggacaccagctccagaaaatcaagtaacgaatgatgaattcactaagaaaacaacagagattgaaaaaagtgtggatggtattaaagaaagtattaaaacggtagaaaaaacacaaaccttttttgatgaacgtgttaacactgtagaaaagaatgcagaaggaacaactgcaagtgttaagaaattacaggaaacacaaactgcgcaaggaaagacgattagtgaggctactacaacaataggtcaacattctgacgcattaaagttaacaatgaaaaagaaagatgttgaggattatgttggtggattgggttctataaatgatctacggaacgctgcattcgctcagggcttcaaatactggacacaaaatggtaatagtgctgttattgactcttctgtaacatacagaggctatacaacggctaaattacatgcgactggattgactgaagataaatggtatagccttcatcaaacgatagacgtaactgctggtgaagacattgtagcttcgggttactttatgtccaataacataggacaaggtttcgtgttagaaattgagtatctaaatgcccaaggtagccgagtttcacaatcatcaatcggtatcaatgtaactgcgaattctaattggattagatctgttattgccggaacagttccagttggggctgttaaagcgcgttataaaccttggttgagaaggaatggaacgttatggattgcgttacctatgttgcagcgtggtaaaatagctacagaattttggctacatcccaaagatcaaacggatattgataaaatgatagatgatattgctaataaagtagctactgagaaatacaatcagaaagttacagagttagaaagaagtattagtgctactgaaaaaggcgtttcaattatctctggaaaacaagaaacgtttataaatgagacttataatgcctatgtaaagaaaacagaatctaagttagaagtgttagatgaggggattttagcgcagattttaaaagacggtatcattacttctattaatatgtcacctggtaagattacaatcgatgcggagaaactgaatattaatgccgatacaatggtgaaatggttaactgcaaaaggcattgatacgaatcttattagaattgatggtgataagataaccattgataaagatggtgtaactgttaaaatgctagacttcctattccaagacgaatggggcacaaaaacaactgcagtatcaagacgaaacctaatagcagatcccgacttttctagtgttacaaagaaaaacattggacataacgattattatggatttgaaggtggatatggccttacttggaagtcctggggaaatgtcgtaatagaaaagaatacacatatattcgattacgagcagatggtgaatgctgcaagggtagatatgtataactatccggaagcgatcgtgaataacggtatacatcctggtaacgaatatacagcatccgctcattttagaactgccatgataaatggcgtgcgtaagacaggaaaaccgagaatacacgtatgctgcgttaaattccgagacaacgtaagttacgacatattgagtgaacaaaagatggactttcctgagccgtctacattctacggagaaatcagaaggtattcttttactttcaaagtgccaacaaactatattccgcaacaacacgcattgattattaaagtttgttctggaaatgctgacatgagacaagggacagcgatttgtgtaagtggtgtaacactgtacagtgggaaatatgcatctatgtataattgggatcgtgctgcagcagaaagagcagatggcattcagccgtttaacggactcgctgtaggcggtgtaaataacaatatatctccagcaccagacggacagacgtttgatataagtactgaaaaagaagttaaaatctttaggaatatacgagcaatgcagggaattaacttaggtggcggtggattccaacaatggggtcatattcgttttacagacggtaatatgggagcgggtttttatgcgagtactccaagcggttggaaatttaatgcacttggatagaaaggagcgataagaatgaatgagaatcaaatgatgccacttcaagcaggtgaaagctttccttttatggggaggttggtggatgcagagcgcacagatacagggatttttgttcaaatacctgccgatatgttaaataatgcaggtcttctaaacggtgttagcagggttgaagtatggagagaaatggatgggacagtaaagtttcggattgctacgctgtgtgaaatatgtaaacgcggagcgcgtttgtactcactagatatgggatttgcgaaaaagaacatttgtttagagtgttatgcatcacttacagggaattacccatctcaagaaccgccaacaccaactaatgaaaataacacacaaacagagcaggagcagcaatagctggtctttttttattgctaaaaaaggagatgaaaagatggatcgtattgatgtattattaaaaacctttattgccactttcggtggcttttgcgggtatttcttgggaggatgggatacaacattgaaaatcttagtgacgatggcagttattgattatttaactggcatgattgcagcaggatataacggagaattaaaaagtaaagtgggtttcaaaggcatcgccaaaaaggtggtgctttttcttttggtaggagcggcagctcaattagattcggcactaggaagcaatagcgctattcgtgaagcgacgatctttttctttattggaaatgagttgctttcacttttagaaaatgcagggcgtatgggaatacctttgccttcagctttaacaaatgcagtcgaaattttaggtggtaaacaaaaacaagaagagaaaaagggagatgttcaataatggaaattagaaaaaaactagttgacccaagtaaatatggtataaagtgtccttacacaatgaatccggaattcattacagtccacaatacttacaacgatgctacagcagaaaatgaagtatcgtatatgattcgtaatggcaaccaagtgtcgtttcatattgcggtagatgataaagaagcagtacaaggaatccctttagagcgtaacgcctggcatactggcgacggtaacgggaatggtaatcgtaaatctattggggttgaaatttgctactctttaagtggtggagatagatattataaagcggaagacaatgcagccatcgttgtagctcaactaatgaaacagtacgatattccaattcataaagttcgtacacaccaatcatggagtgggaagtactgtcctcatcgtatgttggcagaaggacgttgggatagctttatcgagagagtccaaaatgcatacaatggagatggtaaagtaactcctacgcttattccaccgtcaactaacgggacaggtattgcgtatattgaggggaatggcataaaccttcgtaaaggtccaggtactggatacggggttattcgtcaattaggtaaaggtgagtcctacgaagtatggggacaatccaatggatggctaaaccttggtggcgatcagtggatttataatgattcatcatacattcattatactggagaaagcacaccgacaagttcgcaatcagtcaataatggtgtaggaatagttactattacagcggatgtattgcgtgttcgtagaggtccaggaactaattatggcattgtaaaaaatgtgtaccaaggagaacagtatcagtcgtggggatatagagatggttggtataatgtgggtggagaccaatgggtttcaggtgaatatgtgaagtttgaagactaaagtaagagccgtcataatgacggcttttttatttctacgtaattaaaatttacttttagataatgcttttaagatcggatttataattctacttattaaacgaaaccccttaaaaatagagctaacaactttcataaaattagaatctctttttattttaaacacctactttcgcaattctgcttgtagaataaagttttcttttatactacctttatatgtataccttattttattcttttgataaacctttgtatgatctttgctaaatactgtttcgtcactaagaccaagttcttgtttaactaaattacgttctccaaaactcagtgaatcatccatcgttcctattaataataagaaagcgaatttaaagtcttccatctcagtaaaataagcatttggagtcattgctaatgaagctttttttatatttttattattatcagtttctaaaacaataataatattgtctgataaaccaatagacgttctcccgtcttttaaaatttcagttgagttaatttttagctttgttttttctcccatctcttttaatgctttttctactctttttgtgtagtcatctactgttaatttagcctctttattttctgcaaccgcaggtttagtgccatcctttttattaccactaacaccagcagcaacaaaaattattattagtgcagcaataatccaaacccaccattttttataaaacggttttttcatatagtttccctccatagatttatacctaaatcataccaatttcatacaacaactgtaaatgttagtttgtaatttattgacgaaaaagaacgttcgttctataatttatgcaaacgaatgttcttttggaggtcatcttatgaatcatttacttaaatgctcgttcaatcaaaaactaccaattgaattaatttatttaaacggttcaggagatttctctcaaagaactgtgattgttagaaagatatatgaagatcgtgtattagtgtattgcatgcaaaaaaaacaagttagaatgctgaaattagctaatatactttctgttgataaagttagaaataactatcaatatgcttaaaaataaataatgaggtgagatcatatgtcaacagcaattccaaaaccaccaaagaaaaaggctactaaaaaagaacctagaccatacatggatgaattcgaacaacaagaggctgctgaattaattcaattggcagtgcaagatgatacagaattagtatttactgtgtatcgaaaatataaagaaccagatgttatccaaggtaaaataattaaactggaacaacaactgaatagaattgtagtgagtgatggaccaaatgcaatacataaaattcaattcatggatattttgaaaatcgaaacgcctagttaatttagctaggtgtttttgaaatatctatgaattaaatatgcgagcaaagttttttcgttttcagttcgtcatagaggtactatataaactccctaatttcggaatacagaattacagagaaaacggaaaacaaaaatttcaaaaatcgaaaaatcaagatttcaaatttaaaaatttttaaataaaatcccacaccaaaaatccaaaatcaaccccaaaaatgtagaatttctattttcaaaaaacatcaaaaaacgtgcggtattttatcgatatagatatatctaaaaaaattcatgcgcacactataggtttttaactcgtacagtagtaaaacgaaatcatcagaacaaaatatatctcgaaataaactttaaaaataaattcacaaattcacaaatttaaatttaagaaaaaactcttttttgttaattctctgttagatcataaaaaccttttgaatgctacttgctgcactcagaaggttttctttcaatacaaaaaagagagaaccaaacttaatattaagactggttctctctttgtcattcaaatatcatcaaccgcaccacatttttcacatttaacctagcacttatatgagtaatatacatcttcaccatctttgaccttactttttgaaatccgataaattttcatttcttcgttataacattcccaacaggtatgtttaacaatatcaccttttttatacaaaactattcaacctccatttcatcaatcaaatgaccgttatattcttgtttctcactttccgttaactcttgatattcttgttcaaatttcattaaatccttattccacattgcaattaatctataataatactcatttttatctgtactcttatacttgtccaattcgccatcttcgtattttttagcataatcttttagcaatccaccgtacacaattaattgtcgaccttttaaagctaaataaaacacgtcgaacacatcttgactcactgacatttcataatcttttgctgaatacttcgcaacctctgcaactgcatttccttctcgaattaactctactttttgaatatgtacttgcgtaatctctggcatatctgttacttctcgccacatttctaaccattcttcttgcttaatataaagctctttacgtttaaaataatttttatcaacacaaagcaatacatgaaaatgaggattatatgtatcataattcgggttatgatcgtctactttcaatccacgagaatcataatatgcttttctctttttgttgttatacatttcttcagtgatgaatcgttctttatcatacgtcatttctagctttctaatataacccttaatagaacgttgaatattacgtctcttaaataatttattaaaagctttattaaatctatcaatctcgctttttaccgtatcagctttaatattcggagttgtcaatgttaagaaaagaaactctttcttttcttcaatcttgattgcttccatcattgttgcgattttcaccgcgtccttccctgcttttctccaagcacaaatcggacaaaatcgatttttacaatcattaccctttactcgtttctttttctttttatctttcgtagccacaaactcattaaaagtactgcacgatttaaacaattctctcccgctctcactcattttcttctctataaattcataaattcttatattctgtttctttttaggttgtaatttaccagtgatttcatcttgatttttctttgtcatgtttgatatattagtcctatatgaattgcttaaaaaagggtacacgaatccctttttcggacttgctccttccttggtagttattgtttttaattcgacactaaaaatgataaatctacccgccggaaatagcaagtcttttttttcgaaatcccttgtgtatcaagggataaaagaatacataggcatcaatttccgtgcggaaatagttacctatgtattaaagaaagaagaaaaccgtatttttcgtgtccgaaaaaccataaaaaaatgcccttcaatccacttcgtggacaagggcattttttcttttaaaaacaaaaattattcctatctctcagcctcttcattttcacttctaagcgtttttcaaacaacttataatattttctctttaagaattacacatcaatcccctatacctcaaaaacatatatttcagaacacgttcgaagtgttgccatgaaaaaatcgagaaattctcgaactttacctgctaattagaataacaggtaactccctttacactttctttgtctaaataaaacaaattcaagcaaggctctacaatcttccctatcttttgcaatgaaatataaatttgtttacatatttctaaaaatgagtataattgtattgacggttaatacgttataactgttataacattctaactaaacgtcataataatacagaaagactaaacacaacaaacaaaagagaaaactaagaagaccgaaaaaaccaaaagcaaacaaacaaaacaaacataaaatcacactatataattcgaaaaactcaatacaaacacaaagtggcaattagactacgacaaaaaatagtgtggcaaattccaaggaggaagtccaaatgacagcaaacactcgccacatggaaacacaaaaaatcgaacgtaaagttactaaaatcggcaattctttaggtttaacattaccgcaagaattttacactactctaaatatcaaacaaggtgacgttgtaagtttagaaattaacgaagaaaacgaacaaatcgttataaaaaaatccaaaaaaatttctatgccagaggatctcaatcctaagttcttggaatcgttaaacagaaccatcaataaatttgacggtgcatttaaagatttggtaaacagataattatccttcaggcgtggaggaaagtaggaaaaccgaaatgacaatttatataacagaaactcaagctatttttatcaatgaaacacttatcgacatgtattcacctaatgaacaaagaggtgttaaagatacagggttattacaatcagcaatataccgtccacaacaaacagtagcacaagaggatgcatatccgactatcttccacaaagccactgcattatttgaatcattggctaaaaaccacgcattctataatgcaaacaaaagaacggcattagcttgcctagaaatgtttctgttatacaatgagtacgaattaaaaatgtccgaacaagaatcttcagatttcactgttaatgtagtagaacagagattatcttttgaagaaatcttaaaaattataaaagaaaactcatcaaaattacctttaaattagaaaaagacgtgggatttaaccacgtcttttttattaaacaaactatcttcaaggatgttatacaaggctctacaatcctcgctatattatgcaaaacaagttccgctaacgctacacatctaaagaaaaaagagactcacacagagcctcctaacatgccattattctttatcttccaaagatactaatacaacattttcattcatatcacgcaaacgttcacttatagctctcagacctccactaagtcccataatttgatcattcatttccttgataagttctccaattccagctaattgttcatccttacgatcataatcatcaattttcatcgtcaattccaaaatcctacatgtctcttcaatcgttaaattatttttcttagccaattcctttacagtacctataaacttaactccataactatgaaaatattccatccttggttgttgattaaataatgttcccacactatctctccaatccctggtcccaatttttctgttggcttcttcgtacttgttttaatctcttttgttgttcttcatgctcttgtttgtgattcaagaacttttgagcaccctttacttcatcatcaccagcaaaatgtcgttttaaaaacttgcgattcatcttgtccagtatactccccttaacataaccaatcacccctgcgagttcaggaagcttctccttatacatctctttcactcgctccaacgttttcttaagaaaatcatttgcttccttcaaccctcgattctctcttttcaagtctgttacttgcctttctaaaaaacgttgccccttatataaatcatctttttcacgttcaatcttaatcttttcatttttaaggcgtctattttcgtttctaagagactcagaagacttagctaatgattttatactatcgaagtcttctgaagcaatctcgaccattttagagcgtatgaacccgcctttttctttgactggaatctcatctacacttttcgcttgatctaaagacgatgctaaatcataaagacgactatctatttctttcttttcctgctctaacttctctatttcttgttgcaaactcaccgctttaaaccgctgcgtcgataaatgtttcctgtcgctagaaacaccacgctctatatcaaatcccttttccttcacatgttcatagattttatcttgtagatcatgaagctctgatttgtttttaaaaaatgaatacgctgatagtttttgtttttcattaaccggaaccatgcccacatgcatatgaggtgttttttcatcaacatgtactgaagcatatacaaagttctcttctccatatctcgcctttaaaaaacaaacagactcttcaaagaatcgtctctgttccgcttgagataaagaattcatataatcaggactagccgaaatcataaacgaacaacaaacaacagcatctttccgaatcgcacgattagatacaacaccattatcaattcgattttgaatgaatttcttataatccacttttcttttatcatgaataagatcataattctgttccgttcgttcttgaataatgtctgaatttgaatgactttctttttcacgctgattatgtatttgtaatcctttcacatctgtcatcttgaatttttgcatatgacaaaccatgaattttgacatgggcatcgctccttcttcggtcgtagttccatgtaaactgtagcacactacagtttactgcgtaaacacgtgtgccctacgggacatttcggcgaccgccgagccatgacaggcatggcaaaagaattatgggctttgcccaaacccacaagggaaactcttccccttgacccctttcaatcgaactccccaacccctcaatccttgagggactccctcgccggtaggcatccccaaaacatggttttgggaagaacaagagggtcttggtcgaagttacctatcaactccttaatgctccatcatttcgctatcgcttcattccgtccgcttaccgttgacaggtaccataaatactcctcccccttttaaaatctgacatccatatattaaaaagtctctttttatattcaccgccccaccgatctatgggaattttcttgtagtgaaataactacttcctctacaaacatatttttttgttttacaggaagagcttcagctttttctattctttcaaacaccccaaaaacattaatacaatcacattttctattagaatcactataagaatagccatagggtaaaactacagatattcgtatattcattcctagacccattcaaataaaaaagagcataaggaaaccgaatcccactttgtacaaaaagtggtgaaatagactgtgcctattgggtttctcatgctctacttcagggaagcgattttccctaaagtatgcgtcctctatacgtttaaaaacgtttagtatgtattctgcatgtgctttgcatacaccatgacaaataaaaaaagagccccacaaataggaactcttttttcattactcatcaattccaccatttcattttactgcattacgataatcacacataaagttaaacaaaatcacgaaatatctgcctacctctcatcttccaagatgttgacgcacctagcaagcctataatttcatttaccatattcatgtgataacaaacagaaaaagaaagaaaaagacagtcataaaagtttgccgaaatttaaaataagcatataaccctaccaaaaaccatatgcgaatataacctgttttccactagcaaatattaataccgatttcatcatacacaagctatctaaagatagaatagcccctaaattattttgtctcactatcgtctggaatatattcaattaaatccgatagtttaacatttaacttttcacagatcggtagcaatgtatctattcgtaaagatgacacattgtcgttacgccacaacttattgatagagttacgacttacccctgtcatcctaaccaactctgcaacattatctatattctttaccgccataatcacacggaagttatttactactttcattttttatactcctttttctcatgaaatatacatgcttttttcttataagggcacttttgtgcaaagaatagttgttttttaaccttttaaacacaactttagcactttataaaacatttttaaacctgtatggaataaaaaatcatattatgcactatttcatacttcatttaaattaaagttaatttatatacatataaggttatttattttatttatttaaactaatttaaaacctatttaaattaaaacgttcaaaatatgcattatttcatactttatttgttgaaaaattaacctgataaagttaatattaatcaaagtaatatagatttttaatgattggaggtcatttctttggcatatataatatcaaaaaaagtaaaaggaaacatttacttttatgtagcccaatacgttggaacacaaccatattactcaaagcaatacaaatataaatgcatttacgcaatcggcaatcaaaaaatagctttagaaagaatcgcaatgtggctattagataacaaccgtataccaaaagaactactagaaatcggagtatccataaacgatgtgaaatattggtatgaaaaagttgaaaaaacattacagaactactctttaactaaccataaaaacacctgaaaggagcattactatggcatttctaacaaattacaaagcaaacggaaaaagatacttttatgtagaaaaatatgttggattttgtacatgcttaaacaagcgaaaatgtacatgtttatcttgacatttacacttaaaaataaatcattttaatatagatgaattatgtattccagaaagaacattagttaggatagaaaaataagctttgaaatattttttagaaaaaggcgatttcactttgggtgaagtcgccttttagttgttatatgcatgttatataagaaatgagaagtttatttgataaaggaaaaaagtatggagataaataaaattatgttttttgttaagaaataataagtatggctcttctcaaaagaacgtaagttcgtgtataataggaacgaatgttcttttaagaagtaacctaattatagtttagaagtaaattcgagtttagtaagtattaaaaataactaagggatagtatggctaaataaatgtataaatgatcaaggagataaaaaatgaacgatgtaaagatacaaaaagaagaaagagagtgggttccgtttacagtaatgtccgaacgacttttaaatatgagaaagattattggagagaaattaaaagtacaaaaaccgcttttaacaaatgaagcaaaagagagaatttctgataaattattaacgtcattactgtctgagaaagaaatattggtaacatattttgaagatggttacatactaacaagctacatgactgttgtacatatcaatccggtaaaacaaattgtaatttgtacagacgctttttataaaacttacgtatttaacgctatggatattattgaaataacgtaaaagaagctgagtattaaatggcagcttcttttatttctgatttatgagacaaataatacaagaaaaagcagctagcttcgtgctagctgctgagccccagggaaagggagaaaaagatagggtactccaaaatcgacaagagctgtcaaacagcctgattatagtatagacaaattaaaattttctatacagaaagttgaacataagattaggctgtacccacttggttttgatctgcaaggtcagaatcaaatgtattggtcgcgctaacaccgctaaaagtattaacaacaaaaccaacgtttgatgcgccggaaccattataagctttcgtattttctttcggagatacgttgtagaaatcacctaagttaaatgatccattgctattttgtacaactaaatttcctacaactgatggcataattttcacctgctttataataagttgttaacattactatatggagttatagttcagatggttcatacaataaaaattgtggaatagtaaaacgtttggagcgtggatttcaataaaagtgtgttaaaattaatataataaagttgagtaattttttaaaaaaatttgtataattgatatatatgaaaataaaggaggcaaaatgtaatgaaagatattatgaaaaaagttgatttaacagatgccaaatcaagtaatcttgttgcactaatttatagtaatgaagttatattagttgaagacgcattttgtccaaatgaaataaaattaaagtttaatgaaattgcaattttatctgcaattaaaacagctcatattgcgaaagtgtctattaggaaagaacttgaagcgctttttcatgatacgggtgttatattagtgaaacaaaatgttgattatggtagtagccaatctattaccatgcattttgagcaatttaaaaaattgcaagatgagattgaacatttaaataagagtatgtaataaagcagctaaataaaggttctatcataaaggtggaatgtgttgtgttgaaaaagtggtttagaaattatttgggtgaatcgcattgtaaacataaatatatttttattaagatgcaggataatgaggattttaaaaaaggtacattaggtgtagtttatatttaccagtgtgagaaatgtggaaaagagaagttgaaatataaaaataataatgaaataaacaatgaatttttagatatatagcaaaaagtaaccatgatggttacttttttgtttatgtatgcaatatcaaaactattactaaagtatgagttgagttgatactatagtaaatcgctgaataaaaatgaagagagtaagatatagggaaggaggatgagggaaatgaagcgaaaagaaattagtaaatctgtaattattacaggcgtgacacaagggttaggacgtgcgatggttgatcgatttcatgaattagggtggaacatatatggttgtggacgttcaaaagataaaattgaagaactaaaaaaacagtacagtaaaatacatgatttccaagtaactgatgtttcagattctcagcaagttaacaattgggcaaattatatacttaatagacatacggctcccaatctgataataaataatgcatcaattgtaaatcaaaatgcacaactttggaaaattacggctcaagaatttgaaaatgtaatgaatgtaaacgtgaatggtgtagtaaatgtaataagagcatttgttcccgcaatggtagctaggaaagaaggaattatcattaatatgagttctagttgggggagagaaggtgaagctgagcttgcgccatattgtgcctcgaaatttgcaattgaaggtatcactaaatctatggccctggaattaccccatggcatggctgtagttgctttagatcctggagggagtattaatactccaatgctgaagtcatgtgcgccacaatatataaatgaatcgcctacacctgaaacttggtcacataaagcgattgaatatatattgaatataacaatagataaaaatggagattcattgacatgcccagcatgcgtataaaaagcacctttaaggtgctttttatattagtagcacattatatcattcacaaaattacatctgaaaaataaaataaaagattaagggtgagatttgtttgttttgaaagctttagaaaatatttgaataggtgataaaaatgaatccaagcagtttaaaagtgacaggggcatggtttcaagtgggagggaatcttacagctgctattggaacgacaagaggatttattggagaagagaaagttgaatcggatcttgttattgtaggaagctcattacaagccctcggatatatattacaaatcattgcgagcaagtatgatgatggggaagaaaaaagagaaaatcaaaatataggcttagagaatcaaagtaaattacttgatcagataggaattgagttattagcattaggcaatatatcaaatgtaataggaacatattttaatataaatgaacaattgaaagaaaatgattatcttatcattacagggaacagtttacaatcgatcggtgcttttttaggagtagaagcagctttggtggatataaatgtattacagaaaattattatactgggtaactccatgcaaagtttaggggctggattacaagcgtatcaaggtgttttaaatgtattgaaagatgagaaagaaaataaagataatatttttgataagaaggatgagagaatcattgcactcattggtatttggatacaagcgataggaacgttaatttccgcaattggaataactgcaatagaggaagaaaataggctagaaaacaatgaaaagtctgaaatacttatataaatagaaggagatacattgattttagaggcaggttaagattaaaatggtagtaggtttttttgcgtatattttgaaaagtgatatataaaatacaaaataaggagttttcaagggatgatgtatttattagcaatttttcttccacctgttgctgtattgttttgtggaaaaccatttcaggcaataataaatttcatattaacattaatattttgggttccaggagttatacatgcaattcttgtagtgcatgataaaaaagctgatcggcgtttgaaaaaacaaattcaagcatatgatgaaattaataagaggaaccgaagataattcatctgtaaaatgtttttaaaagaaaggaggattcacctcctttcttttttagtgggtgttaagtttaaatttttgtgtggcggaaagaatttttaatgtaagtattatgataataacttttagattgtgcatgtaataggccagtataaatgctttctggtacattaaagaaatcatacataccatgctttaattggattcgcaaaatcatagaaaaaggattataaccaacagcaactatattttttgaggtaaccggagatagcttcattattatgcaactccttatttttcatttttaataattctttgtaggtaacggtattgtggtgttgaaatctttataattaaagaggtattatacctatattcaatatatttaatattggttatacgtaattataagtaagttcacacgaagttcatattgatatgctatttttatttcacctttgatttattaataagaaaatattgaccatttgaaaaaaaggtatattatttatacgaggtaataaaaattcacttctttcattattatgctaaaaggggcagcattattagaaaattagaagtgaaaatagtatgtataagagccattttaaaatttgtaatctgtgaattgggaaaatattgaatgctccaggtcaatacactttcttgcctaaacgtatttacgaaagtgacctcaatatttttaattaaatcaacgggagaattgaaaggcaggagaaagtaacatgtcagaaaattatcgttctcgcgaggagcgacgacaagttaaaaagaaaaaacaaccagcttctaaaacacaaaaaccaaaaggtaaaacatcatttttccgcaagtttttaattacttgtttattacttggtattgtaggtttagtggcgggggttgctacctttttcgtaatgattaaggacgcaccaaaactggaaaaagcaaaacttgttaatccgttatcctcaaaaatttatgataaaaacggggatttggtatatgaatatggaaaagaaaaaaggacgaatgttacgtatgatcaaatacctaaattagtagaaaatgcatttttagcgacagaagattcacgtttttatgagcatagcggagtagactttaaaggtactgcccgtgctgttttagtgagtcttaaaggagattatggctctcaaggtggaagtacgataacgcagcaagttattaaaaactacttcttatctatggataaaacaccaaagcgtaaggcgcaagaaatatatttagcttataagctagaacaacagtattcaaaacatgaaatattagagatgtacttaaataaaattaacttaggtaatcgttcatatggtatcgcaacagcagcacaaaactactatggtaaagaattgaaggacttaacattaccagaagttgcgatgcttgcaggtttaccgaaagcaccgaataactatgatccaacgaaaaaagaaaatgttcaaaaagcaacagaaagaagaaatgttgttctaagtttaatgaaccgacatggatatataacaaaacaggaaatggaagaagcatcaaaagttgacgtagaaaaggggcttaagcctgcagctcaactacaaacaatgccataccctgcatttatggatgcagttgtgaaagaagtagaaaaagaattgccagatgctaatattggttctgacggtttagaaatttatacaacgttagatccgaaagcacagaaacttgctgataatattttaaataataatatcattgattatccaaacgataaattccaaggtgcattcacatttatggatacgaaaacaggagaagttcgtgctataggtagtggccgtggagaaaataaagctgtatttaaagggcataatatggcaattgaattagatcgtgcagctggttcaacgatgaagccgattttcgactatgctcctgcaattgaatatttaaaatgggctacgtatcatcaaatcgatgactctccatttaagtattcaacgggtcaagaagttcgaaatgcagatagaagttatatgggtccaattacaatgcgtgaagcattaaaaatgtcgcgtaatattcctgcaattaaaactgcaaaagaagtagggattagtaaatcaaaagaattctctgagaaactaggtattacatttaatacagcaccgacagaatcgacagctattggtacaaatgaagtatcgccaactgaaatagcgggtgcttatgcggcatttggtaatgaaggtaaatatacgaaaccgcattttgttaagaaagttgtttatccagacggtaagtcacaaagttttggacaaaaaccaaaacaagttatgacagattctaccgcatacatgattactgatatgcttcgttctgtagttacatcgggtactggtacatcggcaaatgtaggctctttagatgtagctggtaaaacgggtacgacaaactattcatcaaagcaattagctcaatataaaattccagaaagtgcaactcgtgatagttggtttgctggatatacaccgcaatatacgatggcagtatggactgggtatatgaaagatggtaaagacgagtatattagtagtaaaaacacgaaaattgcacagttaatctttaaagaaatgatgagcgaaatggctacagataaatcacgctttaaaatgccaagtagcgttattcaagaaggtagtgagctacgtataaaaggtgaaaaacgtgattcatcgccaaatactagcgtaccggatacaacggagcaaccaaaacaagatcaacagcaaaaaactgaagaagagaaaaagcaagaagaattaaagaaacaagaagaactgaaaaaacaagaagaacaaaagaaacaagaggaacttaagaagcaagaagaacaaaagaaactagaagagcaaaagaaacaagatgagcaaaataatggaaatggccaaggaacgacacctccagcaaataatggaggaggtcaaggaaatacgacacctccagcaaataacggaggaggtcaaggaactaaaacggaggaggctcctacattgaaacgtgggacaaatacaaagattactacagagaatactacagagattactacaaataaaaagacttcttgtcacaagtttgaaacttgcgacatggagcatgccaaattgttattccagttaattttagaaaccaatccagaacataaagagccgaacttcgagaagtgggccaatgaattccgcttaattcgcgaaagagacaagaaaacaaatcaacaaattgtgtatctcttggaatggtctcaggatcattccttctggaaaaaaaatatattgtcacctagtaagttgagaaagcaatgggacaggttagtaattgaagccaaagaagaacacgaggtgaagaaaaatgagcagattcgcaagcatagcggaagtcatggcagatttgcaaaagagggctatgaaaaattgccagaaccaacaaaaaagtggagagaacttacagacaaggaacgagaggaatcacaacaagaatatgaaaataacattgaatggctcggagaagacgcttaatgatacctgtccgttatgcagtggaacgggaatgatcttaaatggatggacaggtagaatgtgtgattgccaaaagaaacaatctgaaatagcaaggttgaaaaatgcaatgataccagaagaatttgaagaagcacgttttaaaaattatattcgtcataccgatatgcaaaagaaaatgtttaacagcatgatggaatacttaaaaaagtttaatgaaatcagggatacgaagcgcaatagctttggatatatcgctacatatggcgagggaaggttaaaagccttatccatcaatgaacgggttgagaaaatgaaacttcacaacaattacggattaggtaaaacgcatctacaaatagcagctgctaggtggattatacaaaatgttcaaactgtaaataaagacattgtaaatgcacaaccgagagggtgcagagtagtttgtataagtgatgtcacttttatgacagagattatgtcagcaaagcgtgatgataaaaaggagtactttgaaaagctccatacagtcgtagagtatgcggatgtgctggtttgggatgatctaggtaagagcaaacatacagaatctcgtgaagaaatgtactacgaaatcattaatgagcgatataagcgtaaagcgcccatcatttttagctcaaatgaagatgaatataccttacctgaaaaaattgggtttgcagctgctgatagattgctagggatggcaaatcactatttgattgaagtcgagggagaaagttatagacggtaaaggggagaaatcaatcattttgtgggaatggagttgagtgtatggaacaattaacctttgaagatatcgtaggaaacatggattatacagcgcatagtacggctgagaaattcctctctaatcattcagtaacacctacctatgcagtagaattttttgaccgagatgaaaaacagaagttacgttggtttgaagtgaatacagaggctgaagcaaaagaaaaagcggtagaaacatacgggagaattcaaatcattaaagtatatgtgtccaatcgaacattgaaagaaattatggagctggactaagggcatttttatcaagagagcacatgcatttcctaaaatggacaagccaatgcaaaggagaacaggcatagatgaaaagagaaatagacatgaaaacaaacggcatttacattgtggtggatggaaaaatcaactttgaagaacccccaaagagcggctacggacagcaagtcttatattgggtaaagggaaaagtgtctcatacacaaacaacgattacgaagaagtttaaataaaacgaggtgggaaaataatgaatatacaagaagctactaagttagcgatggaacaaaataaatttatttcacgattacactttatgaagacctttaaggtcaagattaagccaacaaatacgtatgagttgtgtggaaattatccaatttatcctaacgaatttaaaccgcgcagggcgtggaatccctgcgcagatgatttaattgctgatgattggataattgttgattaaggtaaccatgatcttgcttcttttgcaaatttgtatccggttttaagagaattattctcttcacaatatgcaatcccttgtggaagtaagacagtgttataggcaacattgtctgctgcatacacagagactaaatcttcatctcgcaaacgatagagtgctttcgaaataaaatcatcagtctcattttggtacaactctttaaatgtttcaaaagagaacatatctgtcccatggtttttatactcagttaccatgtattttagtagtttttctgaaagcttagttattttcattaattacacctcccctctatggggaattatatcaagaaaattacaataaatgagaattttatggggaatttagtcgggaagcaagtcaagcacgtgtagatgtaaagtaagacaaaatttgaattttattaaaaaatggaggaatgaaccatgaatacagtaattattcaattcggtcaaggtacagaagcatggaaggatatgcgagagattacgaaatttctacaagagaaaggctatttcattgaaccttatgaagaaattggatctgtaaaactaactaagaaaatcagtgacgaattagtggataagaaaagaaaattcaattgtgatctttgctttcaaaataaggatattgaagagaaatcaatttatcaatttgatgaaggtggcgacattgtcgcatgcatggattgtgagaaaaaagcatttgaacattcaaaaaactaaaccaaagcgttattttgtagccatgtaaaaaaagtgcatatttaatatgtactcttgaaaaaaggaggcacttttgagagatgagacataatacagcgtatgctcgtctcaagtaaaagtgcatcgaactcaataaaatatttgttttggagggaaatgaaagtggcgaaatgcaattatgttggatgtgacaatgatgcaacaaccaaaggttttatatttgctagagatccacaaggcaggaaacatcttcctacagatgtatacgcttgcgataaacataaaaagtctctcagtttttttgaatataacactgctaaaacaaactaaattttgatttggaggagaacgtaatggaaatcaaagtgaatgagcaaacacaacgtttttatctagcgtttgatgaatgggtacaatgggtacctgcagttggtcatggaattaaagtgggacaatatcatttttgtgcaattccattaagtgactctattaatgtttcagaagtaacgtcaggtgtgaaggctataagtgtccctataaatttaaaggtttggatgttaacaagcactaaggaagatacaatgaggtttttagaaaaagttggtgagcatttaaaaataattatggaagaacgaggggattttgatgagttactcaaaaaacagaaaaaaatagctttcgaacgtttaggtgcgatgccaccgattgaaaatattgatacggattggatatttgaggaggaaagtgaagttgtacattaattgatacaaaatctttatttttaaattaaagagcgccttgtaaagctcctctgatacctaatcataatgaaaataacgagctcatatagggaagtatttataataattagggatcattatgttccagcttagatttctcggctggaggaataaaatgctcacggacaaagttttgataaatcataccgcttataaatgtaatataaaacactacacacaaaaagattaaaatgtatttaaatacctttttcaaattagcaccaccctaaaagagagttttaataggatgtgtaaaaaaaggtacgattatacaagggcggagcggttagcaagaataaaataaaaacgttattttaaatttaataaaaaaaagagcacattaatgtatgtgctctaggtaaatattttaaaaaaaggagtcttaaagaatttaaattgtcaatacactatatgtttgtcttaaaaaaatgtgcatgagataaaatagaaattttatttgggtgaaagtgaggtgtaggggctggaattagttttttggatagttatcttcattgtaatgggccaaattgcttgtacaaagatggatttacaacaatttttagatacttataaggaaatgctggttatacaaaacaaaaagattgatgacttattgagatatattaataagtgttaattagtagaaaatatttaaaaagaaggacccacattgagggggtgggtccttttactgaagccaggcatatatactaagcatatagagattaactatatattaccaaaaacgaattgaaatttctatgtgctaattgttgagaaataatttataaaagttttattttgtagaaaatcaacaaaataaaacgagcacttgtgccagagtgcccgttttataagatgacatcatttattatgttatgtttgtgagtcatgaacaattaaatgagtcgaaaagtaaggttcgaaatagtttatgtacctgttaataaataggtgcttgtactaaaaagaagtgaagaaatacaagggaggattattggagttccggcttatcgcccatgtatagtatgtgctatgtatgaaaggatattcagatttgcaaaaaataaaaagagcaccttcgaacagtgctctttcccggaagtgtatattacatggacttgcaagaggtttttaaggaataaaatgaataagctcgctcctgaaaggaagaagccatacaataacatatgaaaacgtcgtcgcaggagtgacaatgaaagtatttaaaacccaacaaaatgatccttttaagtggtatttgaatgtttttttgtaatttcatagcgaaaaatattttatcagaattggtaggatgcacaaatttactgtcgaattgatacatgaactagaaggagggagacagtatatgctatatcatttgataaaattaggggaagcattagaatctgaagtaaagcaatctgaggggagattatattttgattcagttaattttggagtttgggtgtcaaaaagtattttgtatatcgaaaagtatcataaagattcttttatagtaaatcaaatgaagcaaagttataaagaaatagattatacaaataattatacattttacaaattgatgttaagtacattgaaagtaatacaagaagaggaaaatgaagaaaaagaggaggctaaagcataatttataatcaattgaagggaaagtcataaggttatcatataagttttgagtagaagaatggaataaagtccggctagaaaactagaggacaccaattcattaaagcagcaattcaagctgttttaggaataggtgtccttttattttgagaagggagatggggagatgaaggtgttgagagatcaattacgtgaatggaaaagcaatcaaacaaaaaagaaaactaagaaaaaacgaaaagagaagttaagcactcgtcaaattgaggatttaatggaggggcataggccttgttatgaacgaagatatggagcaataagagaaaagtaatttaaaaataaaaaggagtggtctggaatgactaagcaattatctttcttaccaaaaatcgatagagcagcaacgcaagagcaattggaggggatgttggaaagtgtacgtatatataagcaatttggaatgatacgtaaggaaatgaaagtcactccttcttatgaaaggaaagagcatggtcctacacatgcagttggcaaaccgttagaagatgtagcaatctctaatattcaacaaagcaagcgtgaagaatgtttagagaaaatggcatttcgagttgaacaagcattaagtcgattcggaaacaatacagttggaaaaaaccagagggacattatagttaaacgatatttagaagacgaagatgtatgcgattatatggtatataacgaaattggcatgagtgaacgtacgtatcgacgtgtgaaagctagagcgttttataaactggcctttgctcttagactagaagtttatgaaactgaagaaactggagggaatgaatcatgaattttgtccagcccatacgtgattcagagcaaatacaacaaatcaaagaatatttaaaagaaaagaatgcacgtaactatattttatttgtaatgggaatcaatacagggttacgtatcagtgatattttaaaactaaaggttggagatttaaaaggtagtcatatctcaatgcgagaaatgaagacaggtaagcagaaacgcatacaaataacagcagcactaaagagagagcttcgatggtttaatgaaaatagagaagatgatgagtacctattaaaaagtaggcagggaaaaaatcggccaatcggtcgtagtatggcatataagatactaagtggagcggcagcagagttcggattagatgaaataggaacacatacgctaagaaagacgtacgggtatcacatgtacatgcaaacgaaaaacatagcattacttatggagatattcaatcattcgtcagagaaggtcacgttacgttatataggtgtaaaccaagatgcaatggataaagcaatgactaggtttaaaatctaatcattgcttttttctttttacatctatacagttactcataaatttcgtaatgtgtaactcaaaagagaaagtgaaatgaaatcaatgataccaagggttttggcgaaggggtcagttacacacaattaaacatatgggtaattggaaggtataaaatatgcacatgacgtatattcatttgtttgttttgtggtataagattgtacgttgttcttcttagatttaaagcgcggtgcgctgttttgttttttgaaaaagcgtgtataagcatccgcaaggttgcgaacagacgactgaatcgcaatactatccacttcttttagccaaacaagctctttcttcatggcaggtagtttggcagagcatgtaccataggtcaagccttttcctgtctctttgtatgcttgatcccataaggataggaaatgattgaatacaaagcgagaacacccaatcgttttgttgattagaattgcttgtgcctgatttggatagatacgaaacttataggctttattcatcattatttgattcacctccatttcggtatatgactattatacaccaaacgtacattcgataggtagtggagtaacactttctgtatgtcgaacaattaagatggcttcctgccatcccttgttcgaagccaattcatctcccacctactcactgggctgtgacccttcacgctcctagaggaaggagtcttcttggctaaaatgataaagtattctgctcgtagttaatacttagcaatattaaagagaaataccaatcatttacttgtgtaaatgattggtattctttacgttagccaatataattttaatttaaaacatggtaagcattcttcctcattcatcattgcaaaaaaataaaacgagaaagattagaatgcgaattcaggtgatgtttttatcatttactaatattcgagttcacttcaatgtgcttaagctttttattttttactctattagatataggggcctatcaataatttatttaaattagattatttaggcaccctcttccgaatcccacacttcaataatatcattgcattaattttctttcggaagtacaattcttttatacaattgaactgtaatcaagtagtaaattaagtaaatcactacgaaaatgacaagtggcaaccaaattcggaaatacggatcaatcaaaagcggaccgaacatgttcataccaactaatatatgagcaatacccacaattgccggtactaagaatatgaagaataactctttataaatcgattgtgttaataccccccggcggacaccaattttacgaagcatttgataacgtgtgctgtctttcgatgcgccagatagaattttaaacattaggcaacttgccatcattgctaagaacgcaattccaacgaagaagcccataaacatgaatccactggccataccatgactcagattatacatttgatacgtactacctaattcttccgctttcacatttttatatttcgctacctgtaattcatcaagttttttccattcttttaaatgtgctccaaaatcatctgttttcccaataaacacagtattttctttatccttcatactatcgtatatgctttggtctataatttttatttcatgatcaggatacatataacttggctggattgtgaagaaagcttctttccattgttttgttttcgtatcatcgttatacagtttatacagttgttttggcaatttaaatgcatccttaggaaattcctctgaaactttcatcatcttcctattttcactatcttgtgctaaaggacgatttttctctacatcttcttttatataatacacatactgatcatctactttgtagcgatattcaaacttctcttgaaataagattccactcaaaattttcttttcttccgctgttggattatgaacgactgaatcgtaaactttttctttatcagtcgtctttagaacgttatttttaaatgccataccacacgcaattccaccagcgccaagagccactaggatagctaccgttgcaagcacccgtgttaggctattaattcggaaattcaattgtgcaaaagtaaaagcattcagccctttttcacgacgttttttattactctttatcttgttaagcataactgggagaagtgatccaaataacatgtaagtaccgactgttgctgtgattaatccaatacccatgaatttaggtacagttaatagctcttttccctgtaaatgcgctatatggatcagtgatgcatacccaatacctagcaaaatcagaccaaggaatgcaactacacctgtcatttttccttttacagcgatacgctctgtttttgcatctgcatgtacaagttgtaatacagaaatacgagagaacttcatgctattcatgattgctgatactataaatagtgcaaagaaaaagaggcaagtaacagtcatagatggaatataaaatgctttataatcttcactagagaattccaactgcttcattaataactgaccaataccttctgcaagccctgtaccaactgcgattccaattgcaagagatacggcacctattacgattgtttcaataaacataagtaaggtaactttatacttttttgcccctaacatcatgtacataccaaattctttttggcgaattgataataagaaagaatttgcatataaaatatagaaaaacgttacaatcgctaatagaaaggaaccgatttggaatgcaattgcaaccgtattagcatgtggattggattcaaggaacgctttatttagtgctaatgtttgaaacatataaaaagttgaaatagatacaatcagaccaacaagtaagacaatgtaatcttgcaacttactttttaggcctgacatggaaagcttaaataacatgattgaacttccttccttacgctttttgtgtacctaagtttgcaagcacgtctaaaatttctttatagaactcttcacgtgtactaccgcgataaatttctttatatagctcaccatcttgaatgaataaaatacgttgacagtaacttgcgctgtaaggatcatgcgtaaccatcataatggatacaccttgctctttatttaagcttgtcatggcatcaagtaaactcgttgcatttttagaatctagagctccagtcggctcgtctcccaaaataattgctggttcatgaactaacgcacgtgctgctgcggaacgttgcttttgtccaccagatacttcagaaggatatttttgaagtatcgctgtaatccctaacatatcagctactttttctactttcggtccaatattacgtgatggaacaccttgaagagaaagcggaagtgcaatattttcataaatagataaattctccaataaattgaaatcttggaaaatgaatcctaacttttgtgaacggaaatcagaaagttcaccttgcttcattctcgtaatatccgttcctgcaatttcaacaacgccgcctgtcgctttatctaacgttgaaattacatttaataatgttgttttaccagaaccagaaggccccataataccaacaaactctccctcttgaattgagaatgatacaccttttaatgcgtgtgattgattctcaccttttttaccgtacaatttttgaatgttctttacatctacaaccggttttatcatttatatcctcctacatttttttatttcattacaataagctactaaatttgtttactactaacaaaatagacatgttacctccacccttaagctacaatgaaatctttccttttatcttcttcactcacctcatcactttgaatacacccatgataaactatgaaaattaggaaacaccccgtaaaatccttaagatttcttaagttttaaaaaaagcttatggaacctgtagttccataagctttctatctaattggatgttcaacaataaaagacatccaaccatctttatattctgcatgtatattaccatgatgaagttcaacaattctttttgaaatagcaagtcccagtccatttccctgatcaccttttcttgccttgtcccccctgaaaaacctttcaaacaatttatttggatcgctaacaggcggtctctcaactttatttgatactttcaaaattgccttgttacctattagttcaagacatatagataattcggatggtttcatgctgtactttatcgcattcataaacagattttcataaacacgtaccattttttctacgtctatgaaaataggtattgtttcttccgttattgatttttgaacgattagaccctccttttcaaatataggaatgtattctccaactatttgttctaacaaacctgataaatcaacttcattaaggtttaacttaacatcgatgcctgataaacgggtatattcaaacagttcatcaattaaatatttcaatctctttgattttaaataagtggtttcaaggtattcctgtaattgtgtgttactttcgtattgtcctctttttaataaatctatataaccaataatagatgtcaatggtgtgcgtaagtcatgagatatgttagttatgagttcattttttgtacgttctaatcgtctttcctgttcaaatgtattttccaattccttggacatatagttgatattttgaacaagttgggtcaattcgtccttccccttaatcccaatggtcaaacccagttttccattggcaatatcattcacattatcagaaatgagcttcaaatatgctattttctttcggaccaatatcaaaaaaatcactataaagttaaaaattgcgaacgagaataagaataacaatgataaattgaattcaaacataccaaactcttcgtgttttttaaataatggatctatgacgtatagcaccataaggattgttaaaccaaatgaaacaaaaaaactaactgcaacagcaccaagaagttttataatgatcttatttctgaaactaacattcttcatattttatacccaattccccagacagttttaatataaataggatgtttagaatcctcttcaattttgtctcttatttttgtaatatgcaccatgacggtattatctgatttataaaaaacttctttccaaactgcttcatatatttttgctacactcaggacaatccctttgttgcgggcgagtagttcgagaatagcaaactcttttggagttaaccttgtttcttttccccttacccatacttgacgagtatctgtattcacggtcaagtcaccaatttctagaatacttttattatgttctatggccgtattgtattttttaaaccttcttaattgggattttaccctagcaattaattctagtgggttaaacggttttgataaataatcgtctgcaccagaggctaggccctgaattttgtctatatcctcagattttgcagatagcataatgataggcatattgcgatcttccctaattttcatacatgcttcaatgccatccatattcggcatcataatatctaaaataatcaaatcaaattccttttcttctaacagttgtaaagcttctatagcatcttctgccttttgagtttttaggccttcattttcaagatatacagagataagatttctaatgtctttatcatcatcaacaataagaatatttgactccatatgattcctccacatttttttcgtattgaaaaactacagacataagcagttgaaacatttctatcttctcttttttataaacttgcaaacggaagatatgaaataacataatagatacaagtaatatcgtttccccctaatttaatgttcaatatttactgctgaaccatctacaatacatgagtttccttttgcttttaattaattttcccgtgaatacacctgtacttagtccatatttgacaatataatttactttttttcaaatcagcttcttcaatcaatttgtctccaagaaaccttgaactcggaagaggctacaccaactaatttttagttcattatatacaaaaataagaaagcgaattgttttcatgtttaattaccccactggtttgaattcataattatactctagagtccaaaccttaagaaaaaagggcaaaagttcttaagaattcttaagctttatacaacagtttgttcagaagaatatatggctactcttgaaatattcactattagcttctcattttgacactcccacggctaaagccgcaagtcctataacttacggtgtaacggatgggattcttgaatgactaagcattcgcagtccatttctgttttgaacagccttcaagatgagggtgtgccatcccccctcctaagacagaccttataggttcttaggctgattgactattaccgccaatcacagttgcgtagcgaatattcatcgccccaacgatatcaagatgtttctcaaacccacattggcacttgtattttctgtcttgcgccttgttttttccagaacatttcggacatgtttgacttgtataagaagggttcacatattcaacctttatgccaactaatgtcgctttgtactcgatgaattgtgctaaacgatggaatgaccaagtgtgtagatttttttcgtttttacggcttgttcgtgccgtctgtctaatgttcgttagttgctctaatcgaatgacagaaatattattatccgttgcaaaatcaacgattccacgacttactttgtggtcttggtcttgcatccatctttttaatttcaaatactagcgaagaaaagttagagaaaataattctctaagaactacctatcgttgtatacgttatctctactcatatattatactattgttaacaccatacctcttccacgtactacaggaaagctgttatatcccatgatgtaatacctcacttttgtttttttaactccactacaaacaaacatgtgttcttttttaaggtttgaaaagggaccattttgttaacatgaatattcaaaaataattttttcaagttagaatattcaaaaacttatttatgcaaacaagcatgtcatgataacatttaacaaaagggggtagaagtagatgagtgttgacattatttctaaagaagaaatcacaaaattattaaacgaatggtatcaagctatgatttcacaacgtgtattacagtctcagaaaataaaagaagatattgcaaataaaatcaataatattaaggaagaccaaacaatattagtctactacgctttattgaatgcacgatataaactgctaattcgggatatggatagtacaaaagatattctggacaaaatcgagcctttatcagagtctacagaaacatttttagagtactatcatcatttatttaaagcaatttacgctattaataaagcaaaccatagtgaagcaagaatgcaatttgaaaaagctgaaacgtttttagaatacatgcatgatgaaattgaaaaagcagaatttaattattggcttgcagtccattactatcacgtattaaaaccgatcctagcagttcaatttgctacaaaggcgaatgaagtattttcaattagtccagggtatgaattaaaaactgcagcatgcttaaatactttagggatggcacacattcgactaaatgaattcgaaagtgcagaggaatatttactttcagcactaggtaccttccaaaaatctaatgatgaacttcttattaaacgagttaagcataatttaggacttttatacgcaagtcaaaacatgccagagttagcaattaaacacttagaggattcattagaaaataacgctaaaactatgtttcttttagcaagagagcattttaagttaggttatagtcatatcgctaatgaatatattgagaatggctataagattagcgacttatgttatcgtcatcatttccgaattttaaaagcagtacataactatgtaccgcaagaagaattagaaaatgtggttatagaaggtatttcgtattttgaaaaagaagaattatatgattgggtaaaagaatatgcttatcttttaggtaatatattctatggttcagaaaatcacgaaaaagccagcaagtatttacacatcgctttagatgcagacaaaaagagtatagaaagaagggcgctaaaatgaaaaaagcaatcttattaatgatgatgttatccgctgtttttacttttggtcttactaatgtaaaagacataccacaaaacgaagcaattgaagtgtttatggatcatggagaacatatttaaaacctaaggaagagggcgcttatagtgtcctctttttaatatctattatttatatgatgaggttgcaggtacgtcttttggttattgtttgataaacgtaagatgtttctaaaaatgtgtatacaaaggtgtaattttgtactgtatatgttcacgtactatataaaaaagtatgaaaatctataaaaataattatttcaataaaatttgttttagatattaaaaagtgccaaaacccttgtggtataaggggtttggcacttttgtgttttttatattttatcaaataaacaattctaaaactgttcattcttctcccaagattcaacgatataatgtgcgatcgtcggattgaagcctttaccaactaaaaacataatcgcagcaacttctgttaatgcgtgttcatgtgatgtatgttttgcttcatttaaaccgtaatctacccatggttttacgaaatctagtacgggtttcttgaaaggtaaaaactgtgtaccgacaacttgttgaatttgttgttgtgttggttcagtaattggtccaggtggtaagatttgtggttgagttggatctattgttggtggtttaggtggtgagacacgtacgtcgtagtttggttgatacatttgttgttggtattgcggttgttgtggttgagttgtgtatggattttgttgatattgttgttcttggttttgtggtgctacatatggattttgttgatattgttgttcttggttttgtggtgctacatatggattttgttgatattgttgttcttgattttgtggtgctgcatatggattttgttgatattgttgttcttggttttgtggtattacatatggattttgaggatattcataatttggacgtgtttcatatggattttgttgaaattcagtttcttgattttgcgttgttgcatatgggttttcgtcatattgtggttcttgctgttgtaactcttgttcttcgtattgttctgtgtatctctgttcttgttgttgaggatacaatggttgccttggataaggcggttgattattatagaacatgtttattcctccttcatgatgatgcctaccacctagtgtatgggcggacaagaaaatatgtgatgaaaaaatgcgggcgtgttacaataagtaactgggtgaagataaaatgacaaaacaagaaaaaattcaaaaaacaattacttttgtaaaacatattttagaaaaagatgcgagtgggcatgattggtatcatattgaacgtgtacataaaatggcgatttctttatctgagcaagaaggtggaaatcgttttataattgaaatggcagcattacttcacgatgtggcagatgaaaagctaaatgaaagtgaagaagcaggaatgaaaaaagtttctgattggttagaagagctacgtgttgaagaaaaggaaagtaaacatattcttcatatcatcgccaatatgtcttataaaggtggccatggcggtaaagtggattcacttgaagggaagcttgttcaagatgcggatcgcttagacgcccttggagcaattggaatagctcgtacctttgcatatggcggggcgaaagggagattaatgtatgacccaactattccgccgcgtgaagaaatgacgaaagaagagtatagaaaaaataatgatccatctttaaatcatttttatgaaaaacttttgaaattaaaagatttaatgaatacgaatgcagcaaaacaagaggctgaaattcgtcatcgttatatggaacagtttattgaacaatttatgaaagagtggaatgcacaaatatgaaaatgttaactgtggagaacttatcaaaatcatatggagaaaagccgttatttgatggattatcatgtagtattacagaaggacaacgtgtcggaattatcggtgtaaacggaactggtaaatcgacattattaaaaataattgcaggattagaaactcctgatacaggtgatatgacgtattcacgtgggtatacaattagttatttatcacagcaaccagagtttgatgaaaaactaacagtattagagcaagtgttccatggtgatacacctttaattcgtcttcttcgtgattatgaaaaagcactattaaatattgaaaaagatccaagtaatgaaaaagtacaggaacaattatttgcagtgcagcaacgtatggatgcaatgagtgcatgggaagcaaatgcaagtgcgaaatctcttttaacgaaattaggaattacagatttcactgcaattgttgggaatttatctggtggacagaaaaaacgtatcgcaatggcacaatgttttattgaaacacctgatttattaattttagacgagcctacgaaccatcttgaccatgagacagttgaatggttagaagaatatttagcaagatatacaggtgcggtattacttgtaacccatgatcgttatttcttagatcgtgtgacgaaccgtatttttgaattagataatggtaaattatatagctacgaaggaaactatagtacatttttagaagcgaaagcacttcgtgaagagcaagaattggcacaagaatcgaaacgccaaaatttatatcgtcgtgaacttgcttggattcgtcgtggtgcaaaagcccgttctacgaaacaaaaggcgcgtattcagcgttttgatgagctaaaggaactagaaggaccagctgcaaaacagtcagttgatattgcacttagcggtagccgtcttgggaaaaaagtacttgagttaaaagatgtaacgaaaaaatttggtgataaaacggtattaaacaactttaatcatattgtgaaaccaggcgatcgcatcggaattattggagcgaatggaagcgggaaatcttcgctattaaatatgcttgcaggtaagttatctcctgatattggtgaaattgaagttgggcaaactgtaaaagttgcttattatacgcaagaaaatgaagagatgaatttaaatcagcgtatgattgaatacattaaagagattgcagaagttattcatacgacagatggaaaagtaattggtgcatctcaaatgttagaacgtttcttattcccgacgcattcacatggtacaccgcttggtaaactatctggtggtgaaagaagacgtttatatttattacgtattttaatgggagaaccaaacgtacttttacttgatgaacctacgaatgatctagatacacaaacattaacagtactagaagattatttagaagatttcccaggtgtcgttttaactgtatcgcatgaccgttacttcttagataaagtagtagatgaactgttcatctttactggcggaggcgaagtgcgtgaattcctaggtagttatacagattatttagaaatggaaaaaacgagagaacttatggagaaagcggaagttcaaaaagagaaaaaagtagtagaagaagctccaaaacaacaacgtaaacgtaaactttcatataatgagcagcgtgaatgggaaacgattgaagatacaattgccgaacttgaagaaaaaattgagtcaattggagaagaacttgcgaaagttggatctgacttcacaaaggcacaagaattatctgaagcacagcagaaaacagaagaagagctagaaaaacagatggaaagatggagtgaactatcagacatcgttgaaggattaaaataaaaacaagctgcatatattgaaaagtaaagagaaaaactttacactattggtagaacctattttaggagggaaaaaatgagaacatctaatccaatgttgaaaaaagaggcattccgtaaagagggagcaagcgcttctgcgatgacgattggcggaacagtaggcaaaacgttcattatgcttatcttgctacttgcaacgtctgtctattcatacatacagatgatgcaggggacgatgaagatgccagtattaattggtgctttaatcgttgcggcaatcatcgcattcgcgtctatgttcttcccgcgcatttcaccttttggtgcaccaatctatgcagcggtagaaggggttgtgttaggaagtatttcagcagtttatacaatgaaatttggcgattctatcgttttaaatgctgtattactaacaatctcaattctatttgcaatgttagtgttatatgcaacacgcgtagtaaaagtaacggataaattccgtacaggcgttatggcagcaacacttggaattatggttatgtatttagtcgtattcctactaaatatgtttggtgtaactgttccatacattcaccaaggtggtacaatcggtattattattagtgcagttgttattgtagttgctgcattaaacttattactagatttcgatttaatcgaaaatggtgtacgtagtcaagctccgaaatatatggagtggtatactgcgatgggactaatgcttacattagtatggttatacttagaaattcttcgtttcgtttcttactttacgaaaaatgactaataaaaaaatcctgcatgaaaaatgcaggatttttttattttcaaagatatattgaatgtatggtataatatggatgatagcaacttgaagtgaaggagatggaatatgatgaaagagaagaaggggattatgaaaaaattattttctaaaagttttttcatagaactagatgaagctttaacgtatccatcatcaaaagttattacttcagcgattgaaggatatgcaactgaatgcaatgaaagactaaaatttgagagtaaagttaaaccgattactttctacttagaaaatgtaatgtaccgtgctgaaataaagatggctcgcggaggatattacatatcttgtactgaagtgtaataaattttgaaactatacatgtttgaactatgtatggtttctttttttgttttgtaaggtccaaaataatactttctacttacggatatatcattttgtgctttttaccattcaaacatttctccttacaatgaagaaaaacatgtgaggtggtataacttatgatgaatcttctctgtacataatagtgctgaattttaaaaaaatgtacagtatggggtactaacacatcactatcaagctaagattatacaatatcaagtatagtagagattatttctttcatttgtttgttttgtggtataagattgtacgttgttcttcttagatttaaagcgcggtgcgctgttttgttttttgaaaaagcgtgtataagcatccgcaaggttgcgaacagacgactgaatcgcaatactatccacttcttttagccaaacaagctctttcttcatggcaggtagtttggcagagcatgtaccataggtcaagccttttcctgtctctttgtatgcttgatcccataaggataggaaatgattgaatacaaagcgagaacacccaatcgttttgttgattagaattgcttgtgcctgatttggatagatacgaaacttataggctttattcatcattatttgattcacctccatttcggtatatgactattatacaccaaacgtacattcgataggtagtggagtaacactttctgtatgtcgaacaattaagatggcttcctgccatcccttgttcgaagccaattcatctcccccctactcactgggctgtgccctccacgctccttgaggaaggagtcttcttggctaaaatgataaaactacttatcttattaaattaagtagttttatgaagtatcccagtttatagagcaggataattataatttcaaaatataaaaacttttagccattgttatttcattacctatgtttagttctgtaatcccagttttagaataagtctttgttgaagaatgtatacaatagaatatcaaggttctattagatgaaattctgaaaagtaaattacgtacagtgctggagatagaaggttttttaaaacggcaaaaaattagattaacattagactgtgtgaacaaattgaactataaataagcagctgcactagtaacagtattaaggcttattttgctactcttccatataatgcttctagaagctttaatttaaaaggaattccatttctattcgtacaaaattgacactcctcccctaaagtggccaactaacgtcagtaggattcttgctaccaaaggccaaatccatttcttgtaccgctgaagtgtaaagattgcggtgtgccatcaccaatcccacaacagaccgtatagtttcgtaggctatggtactgtgatcataccgtacagattgttggttctcaaatgtatttacgtcttttgcatgactatgaataaagtataccttgttttgctatacaaaaacgatgagttcatcccaagtctaaagacggactaaagtcctgcgtaggcttttctataccgtaaattctgtgaacggtattttaaaattgtggtaacatgagcctagatataatatattcaacaaatatcttaggatgcatgagatataggacattcctttggcaaggaagtctctgcccttaatgaccgtgaagcgtctcatcctagtgaaagggataggtaataattattgttcttaaaattctgaattttatatattttatttatacaaagtaatttgttacttattttatattttattgttagaatggataccaagttgtaggaggtgatttacataattaccaatattatcttttcaattttagaaatatggaggagggacgagattgttaagtaatatttttttctttgattagatttagtaatatcattaaaatttatttttttgtatatgataattaaaaaataaaaaaggatacacataaaaaggagatgctaataaatgaaaataccttgttttgttatgcgtggaggaacgtcaaaaggattattttttttagataaacatttaccttcaaataaatcaattagagatgaggttattttaaaagcgttaggggcaggaaatgctcgtggtgttgatgggatgggtacgttagatcctttatcaaataaaattgcaattattcgaatttccactacaccaggaatagatattgattatttatttttacaggcggatttaaagagaaggatattagacgatagtgtaaattgtgggaatataattgcagctgttgctccttatgcagtagagagcggattgattaaagtcgggtcaggaaaagaaactataacaattagaaatttaaatacaaatgtaattgttgaatcaactatagccactaaaaacggaaatgttgtatataacggagatattaaaattgacggtgttccgggtacaggagctccgatagatttgaattttaaaaattcaatcggctcagttacagggaagttatttcctacaggtgcaaaaacggatgttattaatggaattaatgtatcttgtgtcgatgtatcagtgccattaattataattcgagccagtgaattaggaattataggaaatgaaagtccagatgtgttaaatgcaaataaaacatttttacatgacattgatcttattagaaaaaaggtggcttgtcttgcaaatttaggtgatgtatcaaataaggtcatccctaagattgcggtaatttcaaaacctagggaatctggcactattacatcaagatattttattcctcaccaatgtcatagcactcatgcagtaacaggatcgctcgcattatcagcagccataaaaattaatggtacaactgcataccatgttgcaaaaaataatgatttaaataaaatgaaaaaattgaatcaaattataatcgaacacccagcggggaaaattcaaacagaatcagttattgaggagtcatctaatggatatgtaattaagaaatctagtattacacgaacagcaaggttactttttaaaggcgaattaataataccttgatcaatgcattgtttttcttgatatagttttaatggcacattttttaagcaccgagaaatttaaagaataacgtttctcggtgcttatatttattaaggaggcttaaattaaatggataatcttaaaaaagcgacattttttatggttctttcaggaattagcttttcactttctggattttttgcagaacatgctattatatcaggagatttctttgtaactttaacagcaaggttttttattccttttctattcttagtcccttttattataaaaagaatggggaaaatttcattttggagtaatagttataaacaattacctcgagctttttctattacattttcacaggcattattttttttatgtgcagctaaaacctcacttttcatagcaatggttttatataatacaggtcctatttttatctgtcttattacccttttttcaaagacgagacgtgcgacaagagcagaaatattggcagcatttgtaggtttttttggagtgtttcttgttttaaaaaccggtggtattgattatgaatcattcctttatttgggggtaggtttactttcaggattatccttagcattttcacaattttttttacatagaagtgcacagacggatgataatctatccattatggcctatacatacctatatggaacaataatatcgggtgtactctctgcatgtttttcaaaggggaattatattggtgtatttacgaatagtacaatggtactagtatttttatttttaatggcaatgggaagtttagggaatcaatggtttagaggaagggcgtataagttaactacgagaatttcaaatttatctgcgttgttatatttaaacattttgttttcactgttactagatatattgtttaataatagtattccatcagttattcaaattacaggtgctatttttgtgatgggtagtgctgctattccaattatagtacgtgtaaataaacagcaaacagaacaaagaagggcagcaagttcataaaaaatagagtagataaaaggtttccttccacaaaaacatgtagcagttgtgaaagatatgtcattgtctgaacaagtatattcttgtatatacggtgcaaatcttcatagagattatagtgcagttattaacaacaatgaagcaataagcctattagcatgaatattaataaagtagcctttggaacaagagatttagttcgaccgtcttaggatgaatttcttagctattaaaagcaaagactaatcgagatgaactcacttcgaacagtttgttagaaagccaagtggcgaatagtagacctgacctagattcgaatattcattaaatttaggatgttatagagaaaaacgttatatttatgtatatttttggaagttcctgtgttgtaattcactttgtgaagcattctaaagttcatctctttacagttttttaccttattattctctatgtataatactattgacgaagagagtgtatatcctctcttctttttttatcattttagccaagaagactccttcttcaaggagcgtgaagggtcctagcccagtgagtaggtgggagatgaattggcttcgaacaagggatggcacacagaaagtgttactccactacctatcgaatgtacgttaggtgtataatagtcatataccgaaatggaggtgaatcaaataatgatgaataaagcctataagtttcgtatctatccaaatcaagcacaagcaattctaatcaacaaaacgattggttgctctcgctttgtattcaattatttcctatctctatggaatcacgcatacaaagagacaggaaaaggtttgacatatggtacatgctctgccaaacttcctgtcatgaagaaagagtttgtttggctaaaagaagtggatagtattgcgattcagtcgtctgttcgtaaccttgcggatgcttatacacgctttttcaaaaaacaaaacagtaccccgtgttttaaatctaagaagaacaacgtacaatcttataccacaaaacaaacaaatgaaaacattgctgttgtaggaaacaaaataaagttgccgaaactaggtctcgttcgatttgccaaaagtcgcgaagtaaaggggcgtattttaaatgctacagttagacgtaacccttctggcaaatactttgtgtcattgttagttgaaacagaagtgcaagaacttccgaaaacacaatcttacattggaatggatgtgggactaaaagatttcgccattttgtcagatggaaccatctataaaaatccgaagttttttcgatcattagaagagaagttggcgaaagcacagtgtgttctttctagaagaataaaaggatcttctccctggaataaacaacgagtaaaggtagctagaatccatgaatacatggcaaatgctagaaaagattacctggacaaaatctcaaccgaaatcatcaaaaaccacgatgttatcggtatagaggatttgcaggtatcgaatatgttaaaacatcataagttagcaaaagccattagcgaggtatcttggtcacagtttcggaccatgttggaatataaagcaaaatggtacggcaaacaagttattgtcgtatcgaaaacctttgcttctagtcaattatgttcttgttgtggataccaaaacaaagacgttaaaaatctaaacctacgtaaatgggactgcccttcttgccgtacacatcatgatagggatattaacgcaagtatcaatttaaagaatgaagcgataaggcttctaaccgcaaggactgcggggatagcctaatcaattagagttcgatagaactctttacttaggaatccctcacttctaaacgaagtgaaagtgggggtagttcaaagatcttgtatttcttttttagtgaatagctttttagtcattttaaaatttctccggttctaaattttctttctataatacaagaaataccctatcgaatagatttttttacggtctatttaatagggtacattttatacagatatttacttttataataagtgtgcaagttttgtaatagtgctctatttattctaattggagtatttaagctagatactcctatatggatatgtaattttacatatccatataaaagacagatatgtattaatcactattaaattatattgatatcatttttaggtgagggattcatttagatataaaggaattaatggatttttatgtttaattatcatagtataattatttcactttatgaaatgaaatttggatttaactttttttaaatataatattatataatttgaatgaaaaaatatctgaaaaatcaaatttaatcaaagcgattttctggtttacttatgaaaaacatagtgtttaaaatgagggggaagtaagctccttatattctatcaaaaataaataaaaaaaagagatgtaattacttttttgaaaaaatctctatcttcaagtatgtgtgaagaaatcctaacgttaggttgtacaacatttacgatcaaaacttgtaaaaaacaatagtgaagaggtgtacggaatgaagaataaaattatgacaggatttttaataacatcaatcgttactggagcgactattcctatcaatactctcgcaacgccaatcgttcaggcagaaacaaaacaagaaaatatagatatttcctcagcattacgaaaaataggtgcacactccaaattaacacaaacctttatcgatggagccttatcaagtccgaatgtacaacttgaagaagttccatctttaaatacaactcaatttctaattaaacaagatatgaaagagtggtcccctccagataaaacagtattgagtccatcatatcagatggactctttttttactgtctacctataggggataataccaagcgttcagatgctttactctttttttacattagtttagacaagccttaataatagtttattaaaatgaaagtgtattcattcattatattcactgtgtataaagttataatgatatgaacatttgcatattttaatttattgatagaaatttcgtgaaaggtgggatattctagtcataggttaaccggacgacatcataggatcctaacaaaatgtttacaataattcaattataaaatggaggattttatatgaaaaagaaagtacttgctttagcggcagctattacattagttgctccattacaaagtgttgcatttgctcatgaaaatgatgggggacagagatttggagttattccgcgctggtctgctgaagataaacataaagaaggcgtgaattctcatttatggattgtaaaccgtgcaattgatattatgtctcgtaatacaacacttgtaaaacaagatcgagttgcactattaaatgaatggcgtacggagttagagaacggtatttatgctgctgactatgaaaatccttattatgataatagcacatttgcttcacatttctatgaccctgacaatgggaaaacttatattccgtatgcaaagcaggcaaaggaaactggagctaagtattttaaattagctggtgagtcttacaaaaataaagatatgaaacaagcattcttctatttaggattatctcttcattatctaggggatgtaaaccaaccgatgcatgcagcaaactttacaaacctttcgtatccacaagggttccattctaaatatgaaaactttgtagatacgataaaagataactataaagtaacggatggaaatggatattggaactggaaaggtacgaatccagaagattggattcatggagcggcagtagttgcgaaacaagattacgctggcattgtaaatgataatacgaaagattggttcgtgagagctgctgtatcacaagaatatgcagataaatggcgcgctgaagttacaccaatgacaggtaagcgtttaatggatgcacaacgtgttactgctggatatattcagctttggtttgatacgtacggaaatcgttaagtatttaaaaaaggtcaaatctcagaatagagtatttggcctttttatcactatacaatacatggaggtatgaaacgtgaaaggtaaattgctaaaaggtgtacttagcttaggtgttggtctaggagctttatatagtggaacgtcagctcaagcagaagcgtctacaaatcaaaccgatacattaaaagtgatgacgcataatgtatatatgctatcaacaaacttatatccgaactggggacaaactgagcgtgctgatttaatcggggcggcagattatataaagaatcaagacgtagttatattaaatgaagtgtttgataatagcgcatcagatcgtttattagggaatttgaagaaagaatatccaaatcaaacagcagtattaggtcgtagtagtggaagtgaatgggataaaacgttaggaaactattcatcttcaactcctgaagatggtggcgttgcgattgtgagcaaatggccaatcgctgaaaagattcaatatgtatttgcaaaaggatgcgggccagataatttatcgaataaaggatttgtatacacgaaaattaagaaaaatgatcgctttgttcatgtaattggtacgcatttgcaagcggaagatagtatgtgcggaaaaacttcacctgcatctgtacgtacagaccaattaaaagaaattcaagactttattaaaaataaaaatataccaaataatgagtatgtgttaattggtggtgatatgaacgtaaataaaataaatgcagagaacaagaatgactcagagtatgcatctatgtttaaaacattgaacgcttctgtaccatcttatactggacatacagcgacttgggacgcaacgacaaacagtattgcaaaatataatttccctgatagtcctgctgagtatttagactatattattgcaagtaaagaccatgcgaacccatcgtatatagagaataaggtgttacagccgcaatctccacaatggactgttacatcatggttccaaaaatatacgtataatgattactctgatcattgcgaattgcatgatatcaactctttaaagggcgtaggtcacgaattggtaacgaaaatgataaatcttgttccataaatgcaaccacttctgcttgttttgacggatataaatgactatatgtatttaacgtcgttgacacatccgaatgtcctaggcgctgggctaccacaagtggactgacacctctatttattaaataagatgcatgggaatgtcgaaattcatgaagtagaatttttggtattccagaagcaacaacatatttggcaaaacgtttatgaagggtagctgtcgctatacttgtgtaaaattcaccaaatacaatataatcattttttatcggtgctcctaatgtagcatgttcttttaatgttttcaataagtctatgacaagagacggtagcataataatacgatttgatgctttggttttgggttttgtaacttgtctgttatagttggttttattaatattaattgatttttcttcaaagttaatatcttcccatgttaatgctagcaattcgccagttcttgccccgctataataaagagtcgtaaaaaaggcttgatacagtaaatcatctactacatgaatgaattgtttaaactcatcaaactcccaaaagtttaatcgtttattcgattctttttcaaagttgccagcaatttttgctggattacttgtgagaccaaaaaactttattgcgaaattaaaaattgaggacagtacggtatgaatctttttcaaataaacagctgaatacttatgaataatttcgttttggtagatcatgatatgcttagcagttatgttgttaatttttgatttcccgaatttttttagtaaatgattttcaaggatggctttaattgtgttaattgaagactgttttcttctctggcaataccaatcaaaatagctatcagcaacttgagcaaaagttaaacttgaagttgtttctttttccactaacattttggcttccgcttcacgagcttctttttttgttttaaatccacgacgttttacttgtttttgagtgccatcaaactgacggactctgacaacgaagaaatatgttccgcgttctttatctttgtagaccaccatagaaaatcctcctgcatatataaagattgataattcgatttattgagtagattataacttgtttgttaccaaaagaaaagatgtcctaatcagaacatcttaagattgataaaaaaataaattggctggttaaacatatattagagtggctggttctaaatataaccatatatgttagaaagttacgaattcagagttttgaaaatgattgttggtttttcagttaaacaattgttgagaaagtttcctgaatgctgattcacatatgtatacgtgttataataattgtgtatatgtttcacgataaactcagtaataccaagggtttatcaaactgaaaaataataattgaacataaataaagacccatagaagcgtgtgtaagaggtgcgagctgaaaattcctcttacaccgtttacctaaccatcgcttaggaaacaactgccccgtatgagtcaatcttagtatatcatgtttccaaaatattaccattgagaaagttaggatggaggatttatgtttggagaagggggagtttttatgtgttttcgtaaaaaaatatgtgatttaatcgaagacagggacgatctaaactttacagatgtcgcaaataaaatgggtgtttcaaaacaatatttacaaaagtttaaaaatcaaggtaacatcagttttcctaatttactgagattggcttcagttgtaagtacaaaaagtgaagagctttcaatgtttttacatgagtggtgcgtagaattagatagtacagaagccattaagcatagttttgaatatgcagcattggttcgtgataaggttttattgaataaattactagaaaaacacaaaaatgaatctggtacagttgcagagtatgtaaatgtttatggagtattatataagtatatgaatgatgaaatttcaggtactgaaattattaagtgcttaaagatgtataaccgtccttctgataacatgttaaatattttgattgatattatgaaatgttacgattattatcatcaaaagaaattcaatgcaatgtttgatttggttgacgaaattgagaaagagttaatctcaattgatgagagtgatcgtaaaatgtttcttaaggaatgttatatgtatcgacttgcagaagtgttttccccgcttaatctacaaagaaaaaatttagagtcttcaagatattatgccaagttattaatagaagcaaatctatgtacaaaaactgtttcagatgctttatatttattggggatgtcatatttaattgatgatgaggaactttgtttagagtatttacaggaaagttataatttatccaaaaaagtaaatgacgcttcaattgaagcagcagcgcgttataatttagatgttgtcaaaatgtatttaaaccttagtttgccattagattcagatgtacgtttaatcaattttcaaaataatcccacagatgaagattcacgagatggattaaaagaaattttaaagtcaaatggagaaagagattttttaagactttttctagcaatcactgatacagagcctaacagaatatacgaatgttttaaagaatttcttgttcaatcgaactacctctttgtaagtttagtagctaaagaaataaatagaagaggggataattccttgctagtacagcaaatgattgattataatatggataaaggagtggatgaaaatgaaaaaatttactttagtactttgcgccttttcaatgttagctgtgagtagtgtttcgtataatattataaaaaaaggttcatttcaatctgtagaaattaaaccaggtggctaaaaagcgcagcatatgctgtgcttttttatttggggcagctctattaatgagactgagttttatcggtaaactaaaaaaagaaataaagaatttgtttactcttctatttttcctttcaatatatgataaaattttcgacaaatagagcctaaactgttggaaaagagtaaataaaaatgggattaaacggacttatagggggaatagaaatgacgaaagaagagatcgtagaattatttttgaacacagtagatgaagctaaaccggaattaattgaagaatatatagaagaaagttttagaatttaaaagatagcccgtctccaatatgaggggctattttttttcgttattatgatattcttctaatgttttggttatcgccaacatctgttgaagtacaatttcctgtttttcctcagggagcgtatctaatcgttccataatttccttaaattttgtgtgtttctttatatctaattcgttaccacgtcctagtaggaaatcagttgttacttctaatgtatcagataattttgcaatggtatctggtgaaggaaagcgttcttcggattcataataaccaattacacgagacgaagctcctacctttttccctagtatttcttgcgtccagttacgttgttttctaagtttttttattctagcccctatgcccatcaatttaatcacctcataaagttattcatttgaacaacttgttctctttgaggttaatcatagcacattatgttcgaaaagtcattgacaatgtataaattgttcgatatgattgtaatcgaacaaaacgttcttacaggaggtagacatgaaacaatcaattatttatcataaaatcgcagaacattgtggagttactgaaaggtatataagaatgctagataaaaaagagcgtagcccatccatggaagttgctaaaaaaatagctgactttttagatgaatcaatagaggagattttttttaaccccaatacgaacgaaacgttcgtttttgaacggttttacccaaagttaattgaaggaaacgcttcaattaggcgttgatgtaaatataacctatatagggagtggtatccatgcacaaaaacttatttattgctcgaaaagagcaacgcatgacgcaagaagcaactgcaaatttaatcaatatagccccaaaaacatattatttaaaagagcacggtaaaagtgatttcactctaaaagaagctcagaaactagcaaaatacttcaaaacaacagtggatgagttgtttgcaaaataaagagaaaaggggagagaaatacgcatgaaaaacggtaaaaggccaactaaacgagagaagatacatatcaattcatataatttaaatcctgataattggctaatctttaagattaacaatagtataatatatgagtagagataacgtatacaacgataggtagttctctttttttgtctctttgtagaagctataataatagtataaaagagatagtatttatagtatagatagattgaacagttggaggtggaaaaatgtttaaagtacaaagtattattacatcgtttggggaagaacgttggatggttttacataacaagggtgaaccagttatcccaatcatgaaatttataaaacataaggattctttaggaaaagcacctaatacacttaaaacatactgttatcatttgaaaatattctggtgttttctaaacgaaaagaataaagattacagagaagtggatataagtttattaacagaatttattcattggttaagaaaatcaacagatgatataaatactatctatttaaatgacacaaagaagttagtgtacgctaaaagaactgaatcttccgttaacttaatcactaattgtgttatcgaatttttggactaccaatggcgtagtggtcaaatcttatttaatgtaaaatccaaagttacaaaagaagtccataatacaaggcggaagtatcgtaaatttttagatcatataacacataccccaacaaccaaaattaatattttaaaacttaaggaacctaaaagaaaaataaaaaccattactactaagcaggcggaattgattcatatagcatgtaataacataagagatgagttaataattcgtattttatatgaaggaggattaagagcttctgagttattaagtttatggatagaggacttcaatatcaatgatggtagtatcactgttagagaatctaaaacacaagctggagaaaaaagaaaagtatatgtatcaaatgaaacaatgaatttattccaagattatattatcgattaccatactaatgatgtagattctaaccatgtgtttattaatttaaaagggaaaaataaagggcagccaatgcaatattgggctttgcaagctgttatacgtatattgtctaaaaaaacgaaaataaactttaccgctcatacacttagacatacatgtgcaacacaactttatgatctaggcatggacgctggtatcattcaaaaattattaggacatgcccaggtacaaactactttaaatatgtatattcatccttcagaagaaactataagaaagcactgggatgaagcccagcagcataggagaatgagaaaatgaatatcgtagctattaattctaataaaatacaacgtaaagttatgaacgaccttaaagggtattgggctttagatgaatggaaaatcgaagagtttcccctgccagatagaagaggaaaaattaaagaaacaaaaaaaattgttgatttcaataaaattagtaatgaatatattaaactggagataaagtactattctttttattctttaaccaatgaaatttggcttttatccagctttatggagaagcatttttataaaatgtactttctttcaaaatttttagccgagaaattccctcaagtcacatcaataattgatattccttacactacattattagatgaatacaaattatatctaactgaaaataataagccgttaaaatacccccatcatcgtggaggagaatttatttcaccttatcttggagtatgtaaaagtttatatgattttttctctaattattatgacgaacgacctgaacatcaaaaagataaatggaatataaaaagactagggattccatataatatgtctcgaagagacagatttcttaatttcaccagtataaaatttccctttcgggaattagttaaaaaatatgtaaatcaaacattacttatacaccaacaaattacctttgcgaccgcccaaaatattttaaagaaaatgtatttgttttttgatttcattgtagaaacgtatccaaagtggatagatttacagaatctacaaagacaggacattgaagattttttattttatgttagaaatcgtgaaatgggaggaaagagttatacgaaaaatcgtgttcctagtaatcgtcatgtaatagagtgcctttcaaatgtcagaagaataattgaatatatgcaaggttttgaatggaaagaagcacctaaaacccctgttaacagattaatatttcccgaagactttcctcgaagagaaaagaaaaactatcacgaacatgttaaacatgtgccagattttatatgggagcaagtgttggaaaatctacataatttagattcggaaattgcacgattaatagtcattatggaagcaacaggatttagagtctcagatgtatgtcagttacaattaaattgtctagcatataagcaagatggttggtggttggtaggagatcaacgaaaagtaaatgtaaaagaacatattgttcctatttcagaagaaattgtgaaaatcgttaaaatacaacaagaatatattaacaatcatgaaaagaagcataacaacttaaatcaatttttgttccctgttcttactggaaaaaatagagggatggccttttcacaaaaatcggttacctatgcattaaatcaactagccgaaaaatataaaatccttgataaaaatggagaaatatttctatttaagaaccatgcttttcgacatagatatggggtcaatctaattaataatggtatgaatattcttcatgtacaaaagttaatggcacatactagtcctgaaatgacattaacttatgcaaaaatttcagataacactcttcgtagggaatgggaaaaagttcaaaactcagtgcgtattgacacaactggagaattaatacaagccagtctccctgagcaggcagaagaaaacggtttggaactagaatggattcgccataacatggactctattcgtttggatcatggattatgcataaagagtcctaaggttagctgtgaattcttagattattcgttagaaaccccttgtattaaaaataattgtaggagttttcatgtagatacaacatttttagattactataatgcgcagatattaaagatggaagaagatattataaagtatcaaactagcggtcgtattcgttctattgaattgattcaaccaaaacttaataagtataaggaaattagggattcattgaaaaatgaaattggaattttcggtatgccgaaacataaacgagaatatataggagaggaaagaaaaattgatggttaacaaacatccgaatacaacggggttattgaatcatgcctctaaaaaaaagagggaaacacaatatagagtgaatgaagtaatacagttaatggttaaagaaggacaaaaaattaattttaattcagtttcagaaaaagcacaggtttcaaaagcatatttatatagagaacccttaatcagaaaaacgattgaagacttacgtcaacagcaagaaggcatacatgattttaagaatataaaaagaaggacatcggatgcctccaaggatgtaatcatagaaactttaaagaataagctcaatcttttaaaatataagaacaagctattagaaagtgaaaatgagcacttaaaaacacaactgaaaaaagatttaggaaaggtttatgaaaatttataaatatgtgatatcgtcctatcagttgtaaaataacacccttaataaagcaggatttgaacatttttattttaagaaatagaatttaaatcataatgatacatattaaaatcttttgaaaatacctcttgaaccaactgaattgtttctgcgtcataaaaactatcataagtaggtaatcgtggaaaaacaggggttgtaatatcagcgtctgcataaactcctttgtaaatcatcttactcccttgataatgccaagattttgataatagatctaatggtgatttttttaatttatatacctcttctagcttcgaaatacctgtgttaaaattttctagatggatatagtttgtaacaaattcttcttctccttgtatatattgttgtgtaaagtgaggatctacttgatctaattttgtcatgtgtgcttttaagtaatacaaaaatagtttaaaggaaatgggtttattgcaagtttcatcaccatacagaaattgccgaatgggtttccatacgggattttcaatatttggtggtggaaccagagcaacaaaagaacttactgcccttctataaggatttcttactagtttgtacgtcttcttctctttagtttgtaatccattagctaattgtgctaaataatgtgtagagttcttatatacttcatactcatagttgtgaatgaacggattgtactttatcgcttctttaaataaattaatttgataaaaaaaccagtgggctagcgaagtacatccgcttttttggctccaaaacaagatgaggggaaaatctttatgaaaatgagggacacgcccttgcttgtatataaaattatatagttctatatgatccattttgaacctccattcttatatagcaaaacatgaaatatttttaataagcgataactaactttagtccactaacaccaataatgatagctaaaaatatttgaagaggtttaacgggaatcttagtggagaatttactaccaagtatgacacctgggatagaaccaatgagtaagtgaattaataaaagataatctacgtttcctaaattcatatttagtatgcttgcaaccgtcactaataaaaacgcatgtgtaatatctgtgcctactaattcggatggtttcagtcgatataaatatatcattgcaatagcaaataaagagcctgatccaacggaagtaagtcccacgataaaaccgagtattgcaccgataagaattgttaggttctttttttggaccatagtctgtttttgaaaaaaactttgtgtagattcattatagaaaaatgtttttataaaaatagaaattgccgcaaggattaaaacatatcctaatatatattttataattccctctcgattatcatgaaaaattggcaagaaatgaattattattactgcgataattgcactaggtaaactcccaatagctagatattttactagtttaaaattgatggttttctgtttccagtgttgggatattccaaacattttagtgatagaattatatactagatccgttccaacagctacagaaggacttatgcctaatgttagaagaaatggagtcagtaatgcggccccgcctatccctgttactccaaccaatccccctatgatgaaacccatcattataatagaaatgctcattataattccccttccataccgctggcttttcatagtggttatagtttttaaagagactctatacatagtcgggtgataggtatattagttaaaaattaatttcattcttcttatatccatatgcttcaaaatcgtcagtaaatatttctgaaacaaggtttagagcttcttcatcataaaaacttcgataggttggtaatgaagggaagtgtggatttgtaatatcatcatctgcataatttcctttatgaatcatttgatgtgccctatggtgattggagtttgtaaggagtgatatatcagaagaaagtaatccatattctttctccagctgcggaattattgtattaaaattctctagttttatattttgtttgatgaccttttcttctccctcaatatattgttgtgaaaaatgttgatctaacagaatggatttagcccctatttcttttacataatataaaaattgtttaaatgaaattcctttcgattcatttttatcattataaaaatactctctaatctgttcccattgtttcgaggcgtaagggttgtcataaagtattaaaaatgagcttacagctcttttataagggttgcgcacaagttttatggtatccttacttagttccaagagttgcatttctaaatttgtgtagtaatcaactttatttttgtatatttcagattcatagtaatgaatgaacggtgcatatttcattgcttcctcatataacccaatttggaagaaaaaccaattcgccagagaagtacaaccacttctgtgactccaaaataaaattatggggaaatctttatgaaaatgtggaatacgttcgccatattcaattaatcctttaatattgttcttcatcagccaaaccccttcgttattctgatatttattgaacacttaaatacaatggtaactactcataccattgtatttaaacaccactgtaaaggtacttaagttggcatataaaatcccagtgtattaaaaacagcttacataggtgtcttaattttccaggtttatcaaaatgtaataattgcttaacaaactttaaaatatagaaatctattataaagagaattatgtatgaagatatgtatacaacgatagaggcattaatatcgctacaataatcgaaaaaaagtcttgataattcatttcaattaatggaaaaccgtagagtttctatccttaagttgatgggcatgtggcggtacccctataacattattaacttcatttaggagtaccgccccatacccatcaacctaataaaacagtatcctcctaaaataaaaaaccactaaatttatttgttacttccaaagaaagatattcatgaataatttaaaacacccgaataaaaaaaacaccagctaccataaccagtaaacctaaaatttgtataagcttaactcgattttttgaagaattaagcaatccaaattgttctactatcaagctaccaatgatttgaccgaataaggtaaagattacagtttgtccatttccaatttggtcaactagatatacatttattagaacataagacccgcctaatatccctccaagccatatccaccatggagctgattgcttaattggttctttaatatttgtgtaagaacggtccattatcccgactattataattagggtaatagtacctacaaagaatgaaacaagagctgcttgtgaggaggaataaagaacccttcctaattgaccattgatagcaatttgtatagccagtaacattccagccattataccaaccaatcgccaaatccattgatttaccatgttttttttatttgttttagaaaattgtttctcatgatttttgtcttgtatagctaaaaaggcacctgttaagactagtaacacgccggaaattcggctccatccaaatggatacggtattgaattaaaccaaccgtaattatctattaacatactcatcaaagtcattcccaaaattggcattatcgatgtttgcacactacctaatctagggaacaaaagaatattagcggttaaagcaattgccccaccaatccctcccaaccatataaaaataggttggttcaaaaataagtctagtggaatccctaatggtgaaccactaattaatattgtaatagttaagaagattactcctataacaaatgagatcattgaagctaaaaaaggagaaatcacaaattttcttaattgagaattgatggctgtttgtaaagcgaaaacagcaccaaaacttatagctaaaagtatggaaaacatagaaatttacacctcattattattaaatagaaacccagtctctcctactgaagtattctctgtctaaaaaatataaattaaaaacgacggcagtgattatgtcaaagacgtcgtcagatataatacatataataagttcagggttaattataaaaaaatatgattttttatttcaagaagctctgccgttattattttttatgatcctttatccactgtaaccagtaagaaaactcacatgctaaatgcatttgatgcgatttaataaggctattaggacaaagtgcaggaaactcaacaactagacttacttctatcccagtatcagtatctttaaattgatgtcgaactccaccgataatagttccatctttcatacgtgctacacctgttgattggtattgataagacttatctctcggtgtttgcaacctagtttcgtcaccaaaaacaataaagaattgaactggaaacggagaattaccagtagtttctataacttctaattcattttctccaaaaggtcttaatacatagtgatcaggacaagctgataaattcacttgatcattctcacgtgactgttcaagcataaaactatcaattccatttatcgcttcttctgctgtaattccatctaaataaatacttgtttttgaaaatttccgtctatcaccagataaagctgtaccaatacgcatgcccatctcgctcaatctaagtttaaatctcaacttatcgtacatttcattgtatgaatatcttaactttaattccgttagtttttttatcatgtcatttgtatcatgtattttaggctctttatgtcctaatgtattgaaaactttcttaatacgttcttttttccattttgtgagttcttctggtgaaatatttttcccctcaatataaattttcatattaattctcctttgctcttcatcaagtattattccaacgattgtttttactcttattgttagtcaatttattgaatataacctaagtatttcttttaaacatatctgaaaataaaattcccatgatgttattttaaattttttcttctttttgttcgtattttagagtggttaagattagattaatcgtctcttttttcgtatttagagttagatctatctctgaatgggcaatactactaagaccatataaaataaatccagaagttaaagataagttgtccgtatggaatactcctatttttactccatcctcaataacttgttcaatgagtggccgtaattgcataaataatttttgctcaagcaggtaatgttgttctgtatgaaatgaactggcatctttgtagggagccaatttttcaacaaatgtccaaaatatatccagagcatttttcattttttgtataacgggtaattcattcaaagtaagtatttgttgaattttttctatattttttgcgataaaatcgtttaaaagttcatcaacaaaattatctttggatttaaagtaataataaaataaacctgttgctacacctgcatgattaacaacatcctttatgctaaagcctcctataccgttttttatataaagttcaaaaccaatatccattaactcttgacgcctaatgtcaggttcttttgatattcttttcataattcatctcctatattatttttccgcgactgaatcgagttcaatcatacacgactgaacttaattcagtcaagttcgattactttaaattaaaaattctatacgcaaataaaaataagcgctgttccatttttgtaggaaagcgcaagattgaagtataggagtatttatttcttgtgatattcgttctatataatttccataatcttctttgatttaaactacttttctttttattttaagtatagattgcaactctctactctttgtaatagacaagctgactggttgtagttaacaattttccttcaggactccacaattccgcggtctggtcaaagaatccattgtagaattgaagcgcgcgagcatggcctaacacctctttatcaccatgtttagtaagcacttctgaattgatatgaaaataaacggtaagtgaaacagtgccaacaggaaccatttgtttgcgccgcacgtaaatacgcgggaaaaacgcatcacacatcgctgtaagtgataagaaatcgatgggtctccgcggttcatcctggatccattggagtgtgacagaatcggaagtattttttggatttggttgtgataatgcgagtggtgtcccttgtataatcctcatgtcgtagttgtatacccaaggtggcagcccttcagatgaaaaattcttaacttcttttgcggatggtacatttggaaaattcctttctgtagaagaccaagtttttcgccggcttgcaaaaactgcagtacccgtgataataatacctttatcttgacagagttcaatataccaatgttgtgtggatcgattcgttctagtcggtattgccttgatgctgaaattgccgtccaaaaccggcgctgtataattaatagttagagatactggatcgccttttcgttccggatgctccattacggctctaagaagagtggccgcaataataccgccaaatggcccaaccatattggcataacattcagaggtgcacccgtaataaatcccagattccccagtcaactgcgttgctgtatcaaatggatgattttgtttattataattcataatagagtcccccttgttttcaatgcaatatcagtatcattttgttgataccaaattcccacaatagttgtgatattctcctcgaagcctaattccacattttacaactgaatctaattcaatcttacttgactgaataaaattcagtcaagtaagataaaaccgttcataaatcttaaaacaatcagacacatttgcagaagggcagaattaatccaatttaaataaaaacttaacattttgtttctcaaattatgttgtttcttttaccacacaaagatttgaagtagtagacctcctttcattttcagacattttaatactttcaaagaatatcggattgaattttcagtttaatttagttgtaatgaaaatgagttgaatatttagtctgttatcgaattccttacatacaaaaagattgggttatcccaatctttttgtatgtaaacgaagcattatacaattaaactcctgattttaaattacatttgtgttatccttgcaattcgatttaaaactataatattataaagaagattgagtctagaccactcaacttctgatagtaatagctcatttgccatcagaataccctagcgaaagaatcctgctttttgtagggttcttttattgttccttcaatatgaaatgtaatatagtataagccattctgcgtgatgaacatcctctttttagcgctaaacggtgtaatcgtttctcttggaattttgacaattttatttctacaaaatgttgaaaagcctggtactgacgtactggaatgtcttccatataaatgtaatccaatccctctaccaccaactccgatgcaatatgatccatcttctcatcgtaaagaaccaatccctgtagtttttcatacaaatctggttctaaggaaattagtaacttattagtattcttccgcagtacctttttttgcgctttccaataggcttgttcttgtaaatgtgcatgcatcatgttaaatccctcactttatcaatttatttaacaatctacttctcccctaaattaccgatttactttacccattatttctcactgtatcgatagccgctagacaggatgcaatgccaagacgagcttcactatatatttttttgttgaccgtcaaataccaacatcccttttctttcaccgtaaacaagtcatcatactgtcttcctagcttctctagaatggccgttgactcttcaactggattgaaatatttaatcggcattcttataaatggtgtattgttcttgccccaatatccaccgcatttttccaatcctaaaaactcctttgcaattacatgatctaaccgttctgttacgattgataaatcatgatatgggatccaccaattagacgaactcattgctacaaactcttttgtaatcccgttatataaaattcggcatatactaatcccttcgaaatcgttttgtgttacaacaaaatcagattgttttaatggatttccatgtttatctgttgttcctatttcaaactcttcaccttttaataattgaaccgacttcatcattttaaattcccctttttataatttctattttttaaaaaccgtacataactcctgataaaacatatgtgaaaaggatcatagaaatagatactccaaagaatccatagaaccaaatttgatccgagaaattttcttcaataccaaaatagatgtttaactttttgtaattttccgaaattaatggacgtatttttttgaaggatttagttttttggtgaggttgtgttaaaatagactcaccagacgtgattttaataaagggttgtttcatgacaaccatcctttctaaaattatgtttgtatacaagaggaaggtgtttttccaggctgccaggcgcggaaacatctttctcttttatttttactccttatttttcggttcaccaaaccactcatgcattgcatcaattgatacaagccaagttttctgatctcgtttatagatgcgatttggatcacgaggtggttcaaaatatttaattaaaccacgcttaatcatactgttaatctgttcttcctttactaaagatggtttcaccttattcttcactgtttcataggggatcccccaccgtatagctgcttcctgaagaaacatgtatttatcgatttccttcatgaacaattccctttctaatgatgtaaataatttttctttttgttaatgtttaagaataaaaaggccccttaatttatggaatgttcatcactttttattttttccatgctcgtgggctgcacttacgatactcatgatgttattaatagagctttgctcgaaccctgataaccataaaattgttcgcagttcgttttttgtcaactgacgactgatgtgttcttgtaagaattccacaaacggcctatattgattcagttgccattcttccattacttcccctaaatccgattcaatccattcggcacgaccttggttattagtacctttatagttcaaattcattaacaaaacctcctcgtatgataaagttaggttttttaggaaagggatttacctataaacccgtgaattctcccgattggactttcaccaactagataatgtgtccttatctggacacgccgatttgccaacgcaaagaataccagtcatgtacctgtcccatagggacaatatctgtaggggtgtttgtcatatatacattgataccgctgagtcgtttactacgaggagaatacttcattcctttctttttttctcttacagcttgatcttgtaatcgtttttgttgctgttgttttgttaatcgatgaacaattacacgagctggcactttatcaatcattcctacataagcatcagctatttcacatgtttgtcctggttgaagggagttcattaacgtctccatatctatctgtatatactctgtacctttcttaattcttccgtcttggaaataatcagggttaggatttttttgataaatacgtgtattcaacttgatacgagagatatagtaggcctctttatcttgtatatattgaaggtcttttaaatgaaaataacctaaatctcggatacataaatcatttgctgtcacagttggggcacacagagagccgtaagtgcgatcatgttgtttacctggacctgtatgaatatgtaggaactgtccacttaacaaatcatactcaagttgaatttttatcccagcagtatggctgcaccctcctgcacctggataaacagatgaaaatacatccgggagttgaaatgcagttgaatctaaaatacgaatacgcttgaaaacagaagtgtatggagaagaaatcggcatagatgcggccaattttttgcttagtagttcggctagtaggtgttgtaaaagttggacagcagccttattaaatcgttgattcagtccctcaggactgataagtacttctgttgatgcttctaaacagctagataactgagttaaagaagtcatagctacattttggttcacccatacacataaagctactaaatcttttgcttgatacttactggttcgttgtacaaaaccaacatctctagcaagatctcgtaaggtatttggagataaaaaactttgaatctcttgggcaaatagttgtaattcgtcagacacagaaacagacataaaaacgccatcctttcctatgattctacagaaagaatagcgtattttttcattttagagaaattttatattgtcggcttaatagtaacgtgatgctacctcatcgccatcaacttaagaaaacaaatcaaccccaaaacgaaaattttatatctttgcagatatatttgaggtttaagctcatttttctattttgtgggttaataaattacttaacttgatggcgatgtgacgttctccctactaaatctcttttaaccttattttgagtctgcacaaagtattaaatccattcaacttaagtagatataataatattgataaactttaagttaaaagagacacccgctaatttaagggttttcaaaaatttagttagtttaatgttgcttctattagtaaatattctctttctttactatctacttgctgttcaattgaattgatcttataagaagatccatgagctattaacaattcactttcaggtaatttcgctagatttcctaagtatgctgcatgttttccctttggaattgttaagtgaataagaatcggcagtttaggaaaatttcctgttgtctggttaactaatgaggtgctcatatatgctttttccgattgttctgtatgattaaacgcttctttaaattttttcaccttttttacctttttcaagaaatgcatcttctgagactcgtctataaacatttactgcttcgggagttgttacttttgcaagcgctcgatctatgtactgaatttctttatcaaactctttatttgcaggttttcgatcatttctaaggtgtgtattaatcttcgtataatcattacctgtatatctttttattgcttctctttcattttttctttctagtttactttctttactttctttgtcatctgtatcatcttttagcaaatcatctatccacttcttataatgtttcgctccccattctttggctgcatctttatttttcttcgtatcatacccgaaatctataggttgtgtagcattgatcatattaaattggtgtattttccctttttccatttgaataggttgatttgtaatgctattactcttttccgtcatagcaaatgtagacgtaacaccaccgaatacagataaacctaaagatagggtgatagctgtagctaagctttgttttttcattttaacactccttaaaatttatttacattacaaacgtactccttttttgtaaatttcggaatgttattaaatgtttttcaatagacgtctgaccttatatgtttttataacatagggataatttatatataatgattgaagactgaagtaatcgatagctccaaaatttaacttaaataataaggaatattcacgagaattaaagtcattattcgttaatttttttgatatttatacaaaataattacatattgattgggagtgatggtagatatacataatttctcgaaactaattaaaggaataattttatgtatatgaaaaactattagtagataataatttctatatatgattcttaggtacagagaacctaagatgaaaaaataatagaacacaaaaaaagatgttcaacattagtctaattttatatttttcactatttttatagaggaatcttaacaagggaatatttccatgaactatccttgaaataaaatggatacagcactaaatattaaataaaaaaatacttataccttataggggtcaccatacattgaactgcaccccaaaatgaaaattttctttctctacagttagtaactttgagaagtcagctctttttttcgttttggaggtgattacttttcttaagttgatggatgtgtggtgctaccccttcagtatattcttttgggtcaccattatctccacatgctacaggtactgtaaatgagaaagctcttactatcattaacgtacttgttatgtacaaatttattcctcattttacccctaaaaaataggacatggtctgtatttcatctccatttagatagaaggaagaccgttttttttgttttggggtattttttaaacttaatagcaatacgttagtaccttcttgtagcacaagggttgtaataactaacagaaaattaccaatcattagaaaattttatatcaatttactttatattccatttatgtaaaaataattgtgagtacattttttaaaactttcccctaataaagttttgaaaaagttgtctcaacattccctatgttgtaattatgccaaggaaagagagcctatatggttctcttttcttataaaattgaatttttcaacttcatatttaagtagtataagacactattaaggataccattgctgtattgaacaacaagggtagataaaaccaatagtattgttttcgcctttttcataaatgattattagaaatactatataagaaaagggataaataagtatatttatccagaaaataaaaaagtagccaacaaaagttaattgccctgtgaataagaagaacatcaatagaagatgaaagtttgcccgaattatgtctaagcttacaatttacttttttaatattgtgagacttcttatataaaaacaagccataaaataacttgatttgattttattacacttgattatatttttatttagtgtatcattaaattatatggttaaattttctataaatggaaggtggtatataatgttgactgaattacaaaaaaattttttctcacggttacagatacctccgaaagaagaggtaagatttgaaaatttacatgaaattcttcagcaaatggcatatgtaataccttatgaaaatttagacgtgatggacaaaaatatccgaagaattactagaatgaacgttcaagaaaaattactattaaatcagcgcggagggctatgttacgagcttaatacactattatattattttttacatgattgtggatttgatgtttatcgcatatctggtacagtttacgatttaggtggtgataagtggaaacctgacgatggacatgtgattattattttaaattataataatcagaaatatattatagatgggggacttgcctcacatcttccattacgcccagttccatttagcggtgaagtaatttcatctcaaacaggaaaatatcgtattcgtaaacaaaatacggagaaaggaactcacctattagaaatgaaaaaaggagataatggggagagtgcccaattccttaattctgaacctactaatgcatggtgcactgggtttgcgttttcattagatgaaatagatacaaacaaagtaaatgctatacaaaatattattgtagagcaccccgaatcaccttttaataaaggatacattatctgtaaattaattgaagatggacatatttcacttactaaaaaaagttttacagaaacacgaaaatgtcaaaaaagtaaacgaactataaatgaaaaagaatatcaacagatccttaaagaagtattcaatatttctctaaataaataccctgataaaattttagaaagaggctagctaacactaactcttataaaatttctttgtcgtttaaaatagatttgtttaaataaaattacatttttatacctttatataatttcaattgagatagttagtatactttatctacaatatattttaagagtgaaaaagcatgattttttatgcaatattagaaaaagcactcgaaagagtgctttttgttcataaaatataaattaatatagctataaaagtaaatgatttgtattttatttttaatagaataatttcaaataattatgtattttaaggagtgttaatcttgagaagaacaacagaatacatattagggcttaccggtggaattatgggtatcttattttccatttatgctatgtttattgataatctaagtaagactcttaaagtagaaggtataaatgtaataataggcttaaattggctccctattacattatctgttattggaattattggttgtttaattgttacatttaaagctaaaattggtgggattttaatgattatatccgctattggtggttttatttgtatctcattttttaatttattaccaggtactttattattaattagtggattaatgagtctttttcgtaaagaaaagccaaatttaactgtaatatagaataatttatggataaaaaaacaactcaaactgtaaagtcaattcaatcacaaacagcattaaatgtggaaatattgaatcaatctaacaaaatataataaaaaatagaagctttatcgaaattaatttcaaaatttattattaagaaaaaaggaaaagagaattaataaatatcaaatatgatgatatttattaataaaaaagactagtgttgatcttacccctgtcaagtaaacggtatgaaaaagaataaacagccatcgagattcgatattctatcagagctcgatggttgagtcgtttttggaaccgtttatagttataaaagtaaatatactctttaattgcttgtattaaatcttcttctgttttaaaatgattcaaatacaacatctccgatttaaaatgggagaaaaatgactcgatgcaagcgttattatagcagtttcctttgcgagtgtggctaccaatgatacctaaatcggaaagtcgtttgttgtaggcatgagatgtgtactggaatccctgatctgaatggagaatggttccacacatatctttttttgtgccaacatttcaatcgtatctaatacaagttcattatcattgcgccttgataatactcgttgtgccgttgttaattggtctaacatgttacgatagaacttagggtaattggctttctcatcctcagaactaacgtataatccatccatcgcaaagtctaaccccacaactgtttctacttctttttgtacaatttctttttcatattcagtcaagatggatacataatatttcccagtgggtgtcatagaaatcgtacatgacttgaccctatagtcttgtggtatctctctatgttgtttgatatgtaccattttcagttttggcaatttgatatgactatgaagcaacataatatttccgtttactacattcgttgtataagactttctgtctttttctgatttatgttctcttttcgtagttcaactacttatagagaaacgtgtcgcaccatgtccccattcatgacacaatgccccgactccattatcacgagttaaattaatgactttggtagaaggttcataatgtgctaatgtattgccgcttcctctcgcaccaattgccagccctaagcgtcctcctagccctatatactcaggtggaatccccaatatacgggctacatcatgtaacgcctcagatacatgctcaatatgttcttttgcatattgttcggtgcaataatgtccaaattgcattcccttcaatccaaacatagtaactacgtcttcaggtttggtagcaaattctatttctggtccttttctttggagggtatctggcagtttcctactccaagcagctgtggatttcttacgagtcgtaacctttttcgtaagtaaatcattccatgttagttcatgtgatacacgaaggtatgtagaattaatactttttgaatttgtacaaagtgatatgaatttctttcctaatattaataactccataccatctgcatcaacaaattcatcaaaatattcttctaccattcttttaaatgtgtatgtgacattcttatcttttttaaatgcataccaaccgttttgcatttccttaccgtaagaaccaacaagatctatccattgttctgaggtatgtattaactgtatatcatgccaaactcttctacatgcttgcacatacagtttccttgcagtcggtgtatctacaattggcttcttatcaatcctgcccactagcagttgctttaattttgcaacacgtggcgggacatcattttctttttcatgttcaaaagagaatggaattaatgcgtttcgatccaatgtattgagcgcttctactggagattctttttcaatttctgctaaaacttctaaagaaaatgatactaaaaatgattcttttaaggctcttagctctttcttagctcctactaatttctcaccaacatcatagctgtattgattgcgaacttgtttatctgtcctcacatcttgtactattatgttttctcttacctctaaatcgaacagttcaaataaattcatgctaaaatcctcctttataaaataaaaagacagaaattcatagtcgtttttcactacggatttctgtcattccctctgtctgtagacttccatatagttatgtaaatcactcattacgatacactcacacctgttaaagagaaaagatcctcttttgtcggatttagtgcttgtaaccagctatctacctccagaaagtttactttttttaattgttcgcctttttccgcacgcttaaccacctctaaacctccatgctgatgcacaatcattacaagatcatctttcttgaaaatacaatctacatctgcagaatttatgtggtggttacgtagaatcggtttccattttttaagtgaataaccttctacatctaaaaaaccacggatagcagtaaagcgaaaactcgtccctctaaaacatctttccaataaaaaaaggaaatcccgtacacatccattaaaatgaacatgatacaaatagatttcccctgcttgtttggctgctcgctgtgacaagtttgatggtttaatggaaaactgataacaatctcgttcccaaaatgctccttcctttgtaaccctcattcgtaatgcacgtaaatttggcataaaatcatctggatgtgcagaacaaaatatagatacttcataactcattttcatttgaatttccccctggttatatatttattatttttctacttcacaacaattgattactttacacgtagaatagataactcaaaaatatgaagaaaaagtaatactcgataaagccacggcaaatgtttttctccatgatacatgtaaagttctttcgtttcccttctataagcaaattgaacacctaagtgtgtaggaagttttgatatgtcctccatttcaacgttttgaataatctcaataacggtatgggaggactcctttaataatttctttaatggctcaagaggaatattaaataatctactacactccttagttcgctctttgttatatttaataattctggccaattcttctacagtcggatcaaataaaggatttgtaacctctacatactcagacataactttttctaatgtacaatccatcttgttaataatataaagaccccactccttaaacatatcttctaacgtacatggatagccatacacctctaaacagtacttcctttcaaatggaaaataacaatcttcttcacaatcatggcgtaaaattggtaaaaaaatcgtattgtaatactcatcagagttgatgtgtaaggctgtcattttatctgcaatatagtcttctgtatcacggaaaatgctagaattacgctctcgaattggttgagtaacttcattcctctgaaagatttttattatctcctctagtgatagtaatggtttatctagtgtaattgcatgttcgtatttcattataatgatccccttccaaagcaaaaaaaacacaaatcttgtgttttttctcacagtgttttttatttgtatacctaaatctaaatacctttttacaagtgattcctaacttgaaaacaacacaaaaagggctccttcaagtcgattaaaaatgtgcatagcaaaataagctagatatacactaatcggctcaaagaagccctttcaaaaatgaaacaagacgcaacttgcttctacaactcaaccacaacacaataaggtgtgggaataaacggaatcaattaaacattaaatatatatttatattaatcaattcgtatctaaatttcaataactttatgttttatcacaaaaatgaacttatttattttagtttttttcgaaaattatgtataataaaattaccctacacgagatattgagtcatatctcattcgtcatttaataaggcctatataaaaaataaggccttattttttattcttcctttatttactattaactaaatccaattcgtgttacaatcagaacaaacacacgttctttagaggaggattttcatgtttaaaatgttcaaaaaggacccaaaaaatgaagaaacagctattttggtaactaaagattcatttgatattttcttatttcctactagccatgaggagcaataccatttagtaatagaaaacttccacgtaggttacaatcactttttactattcgttgatagaaaaaatcatgcattgcacatttatgatgacctttatactattgttggcggaacaagtgctattaacctaattagcgaatatctaattgaaaaactgtacgaattattgcatttaaaagactataaaaatgcaaaagtactaatttacttccctgagaatcataaagattccggtttagtatcttatggttaccaatcaaaaaaggatgattttgatttcggacttgatatcagtgaaataactaaacatgaagcatatttagaactagctaaaaaaaatgcatagttcattgagctgtataaattaataaaaagacaaaagttatgtacttttgtctttttattttaacgcaatccattcgtagctttcccactcttttggtttcttatcatatttgatacgaccagtcgtacagaatgatgcaatcatccattgtatgagattcatttttgcatacggatcaacacaatcctctaattttttcaattgataacctgtactatttttctgccaaattgtatataaacgaaagtgtgttgtcgtaacaagtctagcttttgttgtaacttgccattttgcaattttcgttaaatcctctttgacttttctatcatactcttgttttatgactttataactcttatctttattaattaatccattagagaatccaaaaggcatttgatgcacctcataaacagctccttcttcatctcctaaaatatttgattctactagaaatatattttttagttttaattgttccgttaattcttttccgctccgataaaatggcttctttatcttctgcaacaagataacctgcacaattaatccgataagtaacggatacgctaatacaaacaccatatgaataaacatatttgcaataagcacccctactagtacgaatatcgtgaaataaatatatgtttctctttgatgaataattctactattcaagctaacatacctccgttttgatagatagtgaacgaaatatacaccattgcccctagtaaaatagaacaagccccaggaaagctctgtatcagctgtatttctttctttggtagttttgccccaaatatagaagcagcatgctccaattggtctttaatcgctcccacaaaccctaaaattttaattaatcgatacacactagcaatccaaaagaatagcaaatggaaagctgttaatgtaatggcagtaagcatagccgattcttctactacattgctaatatataaagctaccaccacaagcatcttggtatcaccaggtgaagagaatttaaatgtctctagcaataaaccacacgctaaggccatgactagtacaattgcaatctctttccctgttcttattccggcaaggtacgtaattcctatccctactattaagaatagtagatgccacatattctttgtttttctatatttcaaatcagtaaatacatttaggaacatgtaacttagtaataatcccacaatatacagacccattttctttactcccctcttaatttcataaaaaatgctgtgtaaaaaagggaaccacttttagagtagccccctcgtttatttttacatttattttttattccaagaatcaatatctgcattgcttgatgcttttgtgaatcttgccaggatcgtatcatagccaccttggattgccttccatacaaatgggccaatgactaatacgataattaccgccagagcgattaacataccgttttctgatgataactgtgaatcctcattttttaaccaacttttcatctttgctaacatttcatttcgtctcctttatataccgattttaagaatctattaaaattagaacttatctatttaaatctttcattacttattccaagaatttacgtctgcattgcttgatgcttttgtgaatcttgccaggatcgtatcataaccaccttggattgctttccatacaaatgggccaattactaatacgataattaccgccagagcgattaacataccgttttctgatgatagttgcgaatcctcattttttaaccaatttttcatttttgataacatgattgaatctcccttttccatttatttgagctatacgtaataaacatcattaatctaaaacttctattacttgttccaagaattcacatctgcattgtttgatgcttttgtaaatcgagctagaattgtgtcatacccgccttgaatcgctttccatacaaacggcccaatgactaatacaataattaccgccaaagcgattagcataccgttttctgatgataactgtgaatcctcatttttcaaccaattcttcatttttgttaacatgtgtaatgctcctttacctattccatttttgataacatcttctataaacttgcaaatccttgcattaaggattgaataacaatcaccattggataaatcacaatacatccaataactgcgacgttaaatttattcatttccattggtttattttgaatgagacggttatagttctcatgttttaactcacgcatcattttaatctgtgcatccataatacgaagactctgtaccttgtccgttttttgcgcttgttgcaatgcaatcgtaaaggtatttacttctggactatttaaagcagcagcaaagtttcgaaatggttgatccgagccagcatacatttctaattccgcagtaagtgtagatacatacggacgaaggtgtctcccggcatatatctctgccttttttactgcttctaatgttgtatgtgtttttaacagctgcagcataggtattagatactctggtaattcgaacttcctagcttctatcgcctgcttgattcttccctttgataactaaaaattcttttgtttttcagttgacatactaccgcaggtcttatatactgcatgtttctattatacgataaaatagaaaaaaggcagaaaacgaagctcgtcttctgcctttttgtaatattattatttcgtttgttgtttattaatagacataatgaacagtccaacaatcccgcctactaatggaagcataatctctcctgctaaattaaagtaggagcttaagaataaaccatttacatcgattacccagccagtaacatacaataacatcatatatagtacgaaataaaactcgcgatttgaaatcgtttcatgttgtgcagttttcataatggacaccatccttttcttttataatggaatataaactgtcacattttgttcacatttcaattgtaaaactttccatcataaaagtctagtagtatgtgtcgaattttgaacggaaataaagcgttatcattatatcttataagtacgtaataagagatgtatattcacgaatgtagtatagtataaacatagaatgatagtgaagagaggggcaaagacaatgacagtttatgatttttcagctaaaacaattaccggtgaagaaaaatcgttaaaagattacgaaggaaaagcacttcttattgtaaatgtagctagtaaatgtggtttcacaccgcaatataaaggattacaagaggtgtatgataaatataaagaccaaggacttgaaatactcggattcccttgtaaccaattcggaggacaagaaccaggtacagaagcggatattactagtttttgtgaattaaactacggtgtaaacttcccaatgtttgcaaaggttgatgtgaaaggtgataaggctcatcctttatatacatacatgacagaacaagcaccaggtttactcggtatgaaagcagtgaaatggaattttacgaagtttttaatcggaaaagacgggaaagtagtagggcgttttgcgccgcagacgaagccggtagatttagaggttgagattgagaaggtacttggagaataattaggagtttcactttattaaaaaacgtctcaaagaacaatgtagttctttgagacgttttctttaaactcacattttcaagattaaattactgtatcaaagtcatctgatttaggtagagaagctgcttttttcataagcacttcccataagtgtacggttttcttccattctgctgcaacctgcccctgtttatacatagcattctcataactggcagtaagttgttgcatatcggccgagttgtaaagtgtatcgatatggagagcgtattctcggaatgtttgactttcaccccgtggcatgccaattctcgcaaattgttttaaaagtgcaccgtaagctttttgataaacagcatcatcttttcggtatttatagaaatgaataataagaaatgtcctccatatcattctagtggtgaagagaatgtatcccataatactaattagtatcgtagagaggaatacgtaccaccaagaaaaactagtttgagaatttgtgacctttttagtagaagcttcttctgtattttctattaaacttttaagttttgcttcattatttcgttgttgtatttgcgtgttattagaattatttgcttcgctattttgtgaaataggagcaggcgtattatttataaaattatagggattagtaaatccttttgttggttcgaatggaatccatccgtatcctgggaaatatacttcggcccaagagtgtgcgttatcgttcgtgattgtataaacattctcaccttctgcagaggcaagtgtattgtcaagagttccttctgtatagccttttacccagcgagcaggaatcccggcagaacgaagtagtacaatcatagacgtcgaaaaattattacagtagccgctttttgtatcgaaaaggaattgatctacataatcttggcttttggcagggaataagacattcgttgattcgtatgtaaaagagttgtctgtaaagtaattttcaatagctaatactttatcatatcggttgtctttatcatttgtaagattgacagccaagtcttttacgcgctgtggtaatgacttgggaagttgtgtgtactttgtcataaaataaggatttgtttcttgaccttcatttgtttttacagctttcaagttttctatggaaaactcagggatctcatatgttactttatacgaatgtaaagtagtagaagagtctccattcattgtataaattttttctgaaaacgggtcaacactgtatgatacatcagaagcagcctcaactgatactaatcctgctggataggtaagatgagggtaacttttttgcatggtaattgttgcctcagtcgttttcatttttgtattttgttcgtaccagcttacgacgtcgtttttatttttaaaagaaatctttttcggattttcagaaatttcccagccttttcctgtataaaaatcttttgtttctactctccaatattgtttgttttgcgttcgtgctgtgaaaacaattgtaggatccgccttaaaaggaccgcctaatcgcgagtcatctaaaccatacccaattgtagaaactttttgctctttacttgcttcagatgtgttgaattttaaaaaatccattgggtttggccattgagggccaaattttggagcaaagtatgcaatggttgctaataatacgataaatattgtaagtggtctaagtaattttgagatttctctagcataattttgtaagtgttcacgttcttttattcgttctacttgaagaagactaagcataaaaaagccgatgacaacagtacgaataatagcgtagtttgcattgtataaatgtaagttatgaaaagttgcgatataaataatagtcaatacaaggaatagaaacccacgttttttatgaataatccaaaatgaagtgaaagaactcaaaaaccaaaatgagagaaaaaataaaaccgtcggaaaaactggagaaatatctagtaaattcccttggaaaaacagggaggaatttcgaaacatattagaaaagaatgttgttagccaagatggatttataaaagcatttttataatatagggaatgaatgataaataagactgtgacaatttttataggaatctgccacctcgtttgaaaaaaagagagagcgaagcaaattcctataaatgttacgaaaatatctaatctacctacatttgtaatgcctataagaggtcttagccattctagtaaaagaagaaatacacatgcatgcatgaagaatctgttcgtatcccacttgtattttgcttgtaatatcatcatttgctcacctcaaaaaacacgtttgtataccggttttcataaaccgtgtttacaaatatttgtcgtttttttagagtttctagtatactgagttctcggtgtgaaagttgattcgctttttctttcacgacaaaaaccatacattttctatttcttatagcagcacaatcagccgccttttgaatatcgggagaaagattactggtcacgagtataaccgtgacgggctcataaatttttcttagttccatgtctacactctgggagagcggaaatacactgtctgcttgtacttttgctaaatgacaaaggatttgttgtaactgcgtatctccattgtctaaagggaaaatagtttgttcttttccgatagacacgaatgatgctggtgaattttgtttcaagacagcccttacaatagaggcagtaaatgtgacgactgattcgaatagaggagactcgtttctgtctatgaatatcatgatattatggctgcgctgttgttcaaactcttttgtcataatattgtttgttcgtgcagttgctttccaatcaatccatgaaaagcgatcaccaggtttatagtctctgacaccgacagagattgtagagtcttttgctgaatttatatttgctgaaagcgctccttgttcgaaatgattttccaattgtcgatacgctatatctacatactggggatagactaaaaatgtatctggaactgaaaaagttgcttctttctctatcatgccgaataaatcgccggttttgacacgtacgcttgaaaaagtgtgctcgcctctagggattgtgtcaataacatattgaaacgaaatatttcgttccaatcctgggaagagtactaccttattcatctttatttgtttacaacttataaattgtggtggcagttcatcttctataactaaataaagtaagggaaaaggaaattttctttttattgtaatcgtgcttacaaattgttctcctactacatatccattctggtttgttattcgctttacttcagcgtcccgtaaagcgtagaaggggagtagtagcgaataaagagcaatgggaattatgctgtaaaataaaaaccaactgacaaaccctccttgaaacatagcgtacacaaatgttaagactaggcataaagggagtagcaataacttcataacgtgatatagtgctcgcagcattcgtttcatcaagggttcatcgccctttgagtaggcacggtagttcgtgcaacgatttttgcgataacttgttcgccagttattccttcaaattttgcttccatttttataatgagtctatgtgctaaaacgtaaggggctaaaagtttaacatcgtctggaataacataattcctgccatggataaatgcataagcttgtgaagctttcattaaagcaattgagccacgtggacttgcacctagctgtatagaactgtacgtacgagtctgattaacaagctttacaatgtaatgcttaattgctttgtccatacttactacccgtacgctttgttgtaaataaagtaattcttctattgtagtaatggtctgtaattgagagagtggatttgttttttccatccggtttaaaatttcaaattcttcctctggtgtaggatatcccatttttagtttcaataagaaacgatcgagttgagcttctggtagagaatatgttccttcatattcgaccggattttgtgtagccatgacaaagaacggctttggtaaaggccttgtaatgccatctattgtaatattgccttcttccatacattcaagtaaagcagattgtgtctttggagatgtacgattaatttcatcagcaagtacaaaattacccataattggtccaggcttgaactcaaattggagctctttcggattataaatagaaactcctgttacatctgacggcaataaatcaggtgtaaattgaattcgcttataatcagcatcaatggatttagaaagagcacgtactagcattgttttcccgacaccaggaacatcttctaataggacatgaccttcagctaagagagctgtcaaaactaagatggtttcttttcgttttccgaccattattttttcaatattattgattattttttctacagtgggatgtaatgaatcaagctggggcatcgtaatcctcctaatgttattatcgttttctaatctatttagtggacatatttctaattctatttgtagatagtaaaacttccacctttaattctgagaatattcagattatttattttgattatatctagtataattgtttccgtaactaagggcaatacagtaaataatgatttgtagttttatgtaaaatcagactcgatataaaataataacattgggaaaaatttttttacatacaatttatactcttttccttatagcagttttgaaataatatcaaaactctttttcttttgcaaaatagtcgatacctcaaaataccattctcctaataatcacgattaaccataaccttcacaacggaacaaaaggttttctcacaaacttattctctaataaatttttgacaatctcttgaactgtgcgaaatgtcacatctgtattttacaacctctcttatagtaagggtatgtaagagagacgtattaaagacctgcggtagtatgtcaactgaaaaacaaaagaatttttagttatcaaagggattttgtacatgcttaaacaagcgaaaatgtacatgtttatcttgacatttacagcctacgaatactttgcttgcaaacgttgttttatcaggctttttgttatattttcacctcattgaaatgcccagtaacggtattgtaaaataccgtctataattgataacctatcgtaatgtagttgaactataattaacctctttgttacgctaaaaggaattttcagtaaaaagagatgatgtgatattaaaaatttgtttcttattttttattcgtattgcaagcggttggattgttgtgcaaaacttcctattaaatccactcaccgttccccccactagatcaaacaggacagataattgcatatatcaaactttatacttaatataaaagacttcatctaatatacgcctataaggaacatgccatctgaataagcaaaataatatgcacatagtttatacagcacacttaaattcatttgagtgtgttttttgtctactttatgaacaaagcttttcttttaacactattatggaataattatacttttttacgttgacaatagtgttgaaggagaatatactaagcatgtaagttgattgtgaatagtttcacaaataatgtgaatttcttcacatataatagataggagttgtcattattatgagtacttggacacaaatttatgacccattaaacaatatttggttatctgcactaatcgcagcacttccaatcttttgtttcatcatttgtttaatgggattcaaaatgaaaagttacatggctggtctttatagtgtaattgtcgctattatccttgcaatatttgtttataaaatgccagcaacagtagctgtagcatctgccggattcggtgttttatctggattttatccaatttgtactatcgttatcgccgcaattttcctttacaaattaactgttaaaacagagcaattcaatattattcgcgatagtatttcaagcattacaaatgatcaacgtttacaagtattattaatcgcttattctttcggtgctttcttagaaggcgcagctggtctaggagttccagttgctattacagctgcactacttgtaggtatgggctttaatccattaaaagcagcaggtatttgtttagtagctaatattgctggtggtgctatgggtgctatgggtattccagttacagtaccagcacaattaactcaacttgacgcattaactattggtcgtcaaactgttcttattttacctttcattagtgttatcttacctttcttacttgtttcaatggtcgatggaattaaaggtattaaagaaacttggcaaggtattcttgtaagtggtgtttctttcgctattactcaattcgctgtaacttacttcttaggcgcagaacttactaatattttcgcagccgttgtaagtatgatctctcttgcattattcttacgtgtttggcaaccaaaatcttctactaaagaagaaaaacaagaaactaaagtatcacatacattcaatcaaattttatatgcttggtctccattcgtattcttaactgcatttgtaacaatctttaacttaaaaccgattaaagctttatttgctccagatggtgcgttagcaaacttagtatttaacattcagttccctggtcttcataatgctgttatgaaaactacaccaattacaaaagctgatacacctttcgcagctgttttcaaatttgatgtattctcttctacaactactgcgattgtactagcaattatcgtttcacttatcgtttaccgcgtaaaaggtaaaatggttaaagaattaatgattgaaacaatgaaagaattaaaagctccagtatatacaatttgtagcgttatcgcgttagcttacgtagagaactactctggtatgtcatctacacttggacttgcattctcttctactggtaatgcattcccaattctttctccaatcttaggatggattggcgtattcattacaggttcagtagtttcaagtggttctttattcgcaccacttcaagcagtaacagcagaccagttaaacatcgtcccttctacactcgttgccttaaacgtagtaggtggtacaatggcaaaaatggtttcaccacaatctgtagcagttgcttgtgccgcagttggactagttggtaaagaatctgctctatttaaaacagcaatgaaatacagtttaatcttcttagctgttattagcttacttcaattaaacgctgtatttaatatcttttaaaaataaaacaccgatccaaatggatcggtgtttttcacattacatttctttattttttaataaagaagctccagcaatttcagggtgagtcatttcgaatggatctaaaataatatccaattcctcttctgtcagtacaccatgctctaaacataactccctaacagattttcctgtttcaatcgcttcacgtgcaatacgagatgctgcttcataaccaatatgaggattaactgctgtaataattccaacacttttctcaacatattgcttcagcaattcttcatttgctgtaattccttcaatacaatattcacgaaatacacggaatccattattcataatactaatagattgaattaaattaaatacaagcacaggctccattacgtttaactctaattgtcccgcttctgatgctaggcaaattgtatgatcatttccaattacttggaatgcgacttggttaatcacttctgccataactggatttactttacctggcataatcgatgaacctggctgacgtgctggcaattgaatttcagccaacccaacacgtggcccagacgccataatacgaagatcgtttgcaattttagacatgttcatcatacatactttaagtgctgcagatacttctgtgtatgcatctgtattttgcgttgcatcaactaaatgctctgcaccaacaagtgggaacccactaaacgttcttaaatgttttaccacctgttcaatatacgtaggatttgcatttaatcctgtaccaacagctgtcgctcccatattcacttcatataaatgttgacgggactgtttaattctttttatatcgcgcgcaagcactcggctatacgcttcaaattcttgtccaaggcgaattggaactgcatcttgtaaatgtgtgcgtcccattttaataacgtgatcaaactcttttgcttttttaagaaaagcagaatgaagttcctccattgtaataagaagcttttctaacatcataagagttgcaatatgaattcctgtcggaaacgcatcgttcgttgattgggccatgttcacatgagtgtttgggctaattttcgcatacgcccctttttcatatcccatacgttctaacgctctattcgcaattacttcatttgtattcatattaatagaagttccggctccgccttgaatagggtctacgataaattgatcatgaaactttccatcaacaatttcttgcgctgcttctgcaatttcatgtccaatgtctttagctaagtaaccagtatctatattcgcaagcgccgccgcttttttcacaattgccattgctgtaatgagtgatggatgaatgcgatatcctgtaattgggaagttttctacggcacgtaatgtttgtacaccataataagctgcacttggtacttctttttcacctaaaaaatctttttctatacgtatatccttcgttgctatcatttttatcacctatactttttcattctaaatccttatccaaaaaatccgccctctaaaaacacgagtatcattcagaagaatttttcagtatccaccttcactatatagtaccttttttgaaagcgcaaacatttatttttctgtatatcctttttattaaagtttatagaaaatcattctcctactttccttatttccactcgtttaatttgatgcatatccttttcaaggactttaaaataaaaaccgtgtttctcaataatatctccttcagcaacgatttgtttttgtaccataatccagccaccaattgtatctacatcatcagcaattaaatgtatgccaagcaaatcatttacttcactaataagcacttttccctctacgattttatagccttcacttacatgctctataggtggattctcatcttcatcgtattcatctcgaatttctccaacaatttcttctaaaatatcttctagtgtaacaatccctgctgtaccaccatattcatcatacaatacagctaatggaatgtgttttctttgcatttgtaatagtaaatcatgaattggaatattttctagcacttcaataactggccttgtatatggcataatcgagcactcctcgtcccgactaccatccatataacgaataaataaatcttttacattaaccatcccaataatttcatctttatcttcaccaaatacaggatatctcgtgtacttttcttgcgcgattactttaatatgtgtttcaaatggttcgtcctcatataagcctacaacttccgtacgaggtaccataatttcttttgctactctattatcaaattcaaaaatattatttacatatttaaattccctttggttaatctctccgctctcatagctctcagataagattaaccttaattcttcttctgaatgagctacttcatgttcagaagctggatttaatccaaatagaccagttacaaccctcgctgaaccattcaaagcccaaataaacggatacataactcggtaaaaataaataagtggcttcgataacaataagctaacttgttctgctttttgtatagcaaatgtctttggagcaagttccccaatgacaacatgtaaaaatgtaattactgcaaaggcaataataaatgaaactgtactggaaattgcaggtgagaattgcaattttaaaaacaacggctcgagtaaatgtttaatggttggttcccctaaccacccgagccctaaagcagtaattgtaatacctagctgacaggccgataaatattcatctaaatttgtagttacctttttagcggccagtgcacctcgtcttttttcgctaacgagttgatcaatacgactgctacgtaccttaataattgcaaattcaacagccacaaaaaatgctgttaacccaataagaatgactaccatcaataattttaaaatatccacatatgctctttagctttcttagctaaagttacacctccttttaaaaagaagtttcactttagtttcttcaattattggaaagcaactctatataaaatccaccaattttcaaacctcatacaattctaaaggtaaaccatcagggtcttggaaaaagacgaatttcttccccgttatttcatcaatacggatcggttcggtctcaacaccacattgatttaaatgcttcacagcttcttctatatttgtaacagcaaatgctaaatgtctaagaccggctgcttctggaaaacttttgcgctcaggcggatttggaaatgaaaataattcgatttgatactcttctcctacacataaatctaatttataagaatctcgttcctttctatatacttcattcatttctttaaaccctaatattctagtataaaaatcctttgacgtctcataattcgaacaaataattgcaacgtgatgcactctacatatattcatactctctctattcctttctttaccaaagatgcatattctcccttgaaatgaaaaacatatatagcagaatatctcttttagggggcttaccacatgcccatcaacttaaggatagaaactctacggttttccattaattgaaatgaaatgatggcagagaggtcacacccgttcccataccgaacacggaagttaagctctctagcgccgatggtagttgggaccttgtccctgtgagagtaggacgtcgccaagcaactttaagacgagtcagaatgactcgtcttttttgtgttttataaaaataagaatggctggtaaatctcagtttattaaaatttcactttattgttcacatcaacaagttcaaaacgctcacagacgagtaacatatcttcagagaaattaagaccaagctcatttagttcctttgtaaaaaaacgaacatgggtgtctctccagtaattataagtacgatctccttcgccttcagcgatagcgaattcttcgcttacttcattcattggtgttacagttacttctattgtcttaataatagctacaggttcatcattactattgagtataatactataatcaatagtagtcggtagtgattcatgttctaattcataaaaaatgtgaccggagcatgtagcggttttaataccgtcaattactagttgtgcaagataattaggggcatccccaaattgccaagctgtaacagattctggttttttgttgtttccccaataagtatcccaatatgtctgtgctaattgattcatttttatcgttacctcactctaattcatatttagtctctttataattcctaggaaatttacttacttacttatttagtatgtctttgtactcatttaaaagttgtagcggtgtgttgcaaattaaaaagatactatgtggagtgaatatagtttgtaaatatgttctgtacatatatgggatctttaattttccaattgcattttatgataaaggatgtagttacttaaagaacgttcagattatgaatggtagtttattatcactatgccatattgaagtgagtaatactagagttaaaatagatgaaaaaactgatattctaaattgaatatcagtttaataatatgtgacttatatgaatctatagcaatacgaaaagcgtaaataagatagccaacaaaatacgatagtacgcaaaaggttttaaacctatcttctctaaaagctttagaaaagttactaccgctagcatcgctactataaaagaggtaatgaatcctaccgcaaacatagggatgtcatcgacacttaaatacttccaactttttagtaagtctaagcctgtagccccaatcattacaggaagagctattagaaaagagaattcagatgcagtcttataatttacttttgctaatagacctccagagatagtagagccagctctagagaagccagggtatactgctaagcactgaaataatccgattgttaaagcttggcggtatgttaaatcgtccagtgaataggctgctgcctccttcttttttacttctgcaaagagcataagaattgcacctgctacaagtccaatcacaacagtgtatggctggaataagtatgttttaataatatcatgtagtagcaaaccagcaaccactgccggaaatacgccaagaaatacatggaacgcgttgaattttttttctttctgtagaagtggcttaatattacataaagaaacgagacgtttatgatataaaattgcaatggctaaaattgcgcctagctgaataacaatttcaaacgttttcgctctttctccctcaaagcctaataaatgcccgactaatataagatggccagtagaggatataggtaaaaattcagctaatccttctacaataccgagtatgaaggcaataatgatatcgctcatagtttcactcctacaaattaatgaatgtctacttttttaaaatagaatagtgttgcaataaatccggaaattgtcgttactgcaatgatgatataagaatactctggtggatatgtcggttgtaattcgttatttgcgatatctagagtagcggtccacggaaataaatctttatgcttggagtttacgagcataagattagtcattgtaataatgactgttaatataatgggcggtacatagctcttcattacaagagttagtagcacaataggtgaagacaatagaaagagaagtccaccacatattaaaaattctaggaaagaacctaaaagtaaagaaatgttaaagccagggaagttccccaatagccctaatattaaagtaagtgcccaagcgactaaagttagcatcataatccaaagaaagagaatgatgaatttacttataataaagctaatgcgcgacacggggatagttagtaaatttttcagtgtatcttctgcatattcgcgggtaagcaaatatgcaaccactactccatataaggggaatcctataactaaagtagtatataagttaacgtcagtgaataattgatggaaccaaatagttggagtaggctgttttgtttttatatgtatataagaggctactacaactaagaaaggtgcgacaccagcaccaataatgctaattaaaaacatattagagcgttttagttttaagagttctgtatagagtagattaaccaattgttccacctccaactagtttggtgaaataatcttctagtctatcttcgcttatcatcatttttaatacttcaataccattaagaacaaacgttctgtttatgtatccttgttgtccaaaatgagagtaaatacgaatatttccttcatcatgtacttcataatcaaaaatttgaagatgattttctaataacatcacagctttatcgtcattattcacttgaaactctatgtacttacggtttgctttgcgcagcgtatcaagagaaacttcttctagtaactttccttcatgaataattccgatacgatcgaccaactgttctatctcggctaatatgtgactagaaatgagtattgttatatttctttcttgagctaaagaatgaataagttttcgcatttctttaataccaatagggtctagtccgttagttggttcatctaatatgagtagctcaggataatggagaagagcgcgtgcaattcctaagcgttgcttcattcctaaagaatactttcctactaacttttttgtctcatgctgcaagcctactatttctaatgcttcttcgatagcattctttttgtgaaccccaattatctttgcattaattagtaggttttcttttgcagttaagttttcataaaatcctggaacttcaactatagaaccaattctgcttaaaatatctttttgattttggaataagttctctccgaatatttcaatcgttccacttgtaggttttataagactaagcagcatacgaatggttgttgttttaccagcaccgttgcggcctatgaagccataaatctctccttgttgaacattaatatttaaattatctactgatttttgattgccatatactttagtaaggttagtcgtttttataattgtatttataggagacacctgctttctataagttcttacttacatcataaaaaggaaggcttaactgcatattaatcatttcttaactatttcttaaaagtattgtgttttggaatagaaaagccaaaagtagttcgtttccatggagtactttcaacccatatatgcccaccatttttttcaacgagtgctttagaaatagagagtccgagaccgctaccaccaaatgaagagtttcttgattgttcgcttcggtacattcgctcaaatatgttttgtaaatcatgttttggaataccagggccttgatcccaaatatgaagtttgtattctgcatcagcttctagcagttcgactcctattgttttcccatcctttccgtaataaattgcatttttcattaaattaccgataatccgcataatgcttagatgatctgcgatgataggacaagtagaatctggtatgagaatttgcagttcgatgttatgttttgagagctcaggtaaaaattcaatcaaaacttctctagtaacttcagaaaagtcgagttcttcttcttttagtggaaattcattagcgtctagcttcgccatattgaatatttcatcaactaggtgctttaagttatttgatttcatatagagtattttaagatattcttgtttttctatttcagaagcagcaactccgtctttcaaagcatctatatatccgattatggaggtgagtggtgttcgtatatcgtgggagatactagacaaaagttgttttctggattcctcggatcttttggcttcaatctgaacctgctctaatttagctattagctcgtttattgaaaaaacgatattatgtaatgagtggtcattgcttgtgaataatctcgtttgtaagtttccttttagtacacgacttaatttagtatccattgctttacgatgttgaatgaattgtattcttgaaaagaagagataaattgtaattaagataaggataataaataaagacatttttaatcttggacccatttgtatgtttaaaatcccgcaaatgataagttgtaatgaaataaggaagagggttttatcagtcttcaagcttttcacctacaaacttataaccaattccccatatagtctgaatgaattttggattggaagggtcaatttctattttctttctaagttttcgaatatgtaccataacggtattgtcatcttctatataattatcgtcccacacatttcggaagagctgtgtttttgtaaatacttgccctgggtttgaagtaaagaattttaacagttccaattcttttccggttaagctaatttcttctttgtttgtatgaactgtgtatgtatttaaattgatagttagtcctttaaaagataaagtggttttttcttgagcagtattgttacttccgagaactaaaaaacgccgcataagagcttttactcgtgcaattacttcgtgaatgctgaaaggtttcgtaatataatcatcagcaccaatgcttaagcctaaaattttatcaacttcgtgatctttagctgtgagcattaatataggtacgttagttttatctctaagttttttacatacctcgattccatctattttgggcatcataagatctaatataacgaggttatatttattttgattaaataaatgcaaggcttcttcgccgttgattgcagtgtctaccatgtataattctcgttctaaatatatttttaataaatttcggatttctttatcgtcgtctgctataaggatacgtatatctttcatatcttcacctgtttctaatagagttttattgatagtacaacaactctctaattatatactagtatttgttaaaataaggttgctagttttgttggaggaaaacgtccacacaagttaagtctagagttcaaattaacttgaatatatttggaaaaataaatcaaagagaagcagaagccgtgctccgataatgaaatcctatagagacgtatctagctaaaagagcataaaaatattaaattgaagttctttataaaaaggtgttgacgattatactttagaggtgtaatatagaacaagtcgccgatgacaataacgtcgcaagcgacaaacgaaataaaaaacttagttgacattgaaagatgaaaatgttaacataaggaagtcgcaaatgagcgaccaagtagttctttgaaaactgaacgaaacaaacaacgtgaaacgtcaatttttattttagatgctagacaaactaaaaaacaccccctatttatataaaaaactccccttgacttctcatagttggtctttcaatagtgttcatattattctatgttttaataaaaaaatggcttgtttattaacctactattttatctttatatgatagagtgtcttctactcgatatagaattcatacaaactatgctaatttttaagagaaagtggagagaactactactagttatggtatttttcaataaacacttgttgaagaaaatgttctaattacaaataatatcttattttcgagtacgctttttaaatgtatatttcacaatgaaaaatgggaaatccacaaataaagtctatgtatatgtgagttaatgggaaaatctagtgtgtttttaaggggcgtcttatttaaaagaaaaaaggtttgttttagaaagtggtgtctaaacattaaatggagtaggactaaattcacggccgctcattaaaaagcttttaattaggagaagtctgtttttataatgaataatgaaaagaaagtttggtacaattgtttgtttttttctttttatgtgtttgcctcgtacccttttaagctagtggacatactttactaatagaaaggattagggggtgaggtattgggttctcgatttaataattgtaaaaagaagtgtacatgtaaacaagatgattgttgggaagtattcgaagagtgtaaaaaagaacagcatgagaaatgtgataattcttgtgtacaaggaattagagatgaacttaagaaattaattaatcgaacagttcaaattaatacagagggacgtacttatgtaggtactgtttcgtctgtaagttgtgatgtagttaggcttgcggctattcctggatcggttggagtaattatttccatttgcaaaattgaagcaattttcccaccggttacaacggttactgctgactttgattttaatggtattgatgtagcaaacaaagcataattatgctgcttttttgtaaagccattcacatgaatggctttattttaattttatataaaaggagaatatattctttatatagaaataagtttgaggttataaagcatgatgtacgaaaggagcaaggaagtgattaaactagaaagctttaagaaatctgattttaaacaattaataaattggattaattccgaagaatttctaatacaatggtcaggaaatgcattcacatttcctttagacgaacagcaattagagaagtatatagaaagtgcaaatacactcgctttcaaagtggtagatgaagagacttcagacgttattggacatatttcgcttgggcaaatagataatattaataagtccgctagaattggaaaagtattagttggtaatacgaagatgagaggacgttctataggaaaacatatgatgaaagcagtacttcatattgcttttgacgaattaaaactacatagagtaactcttggtgtgtatgattttaatacatcggccatttcatgttacgaaaaaatagggtttgtaaaagaaggcttattaagagagtcaaaaagagtaggagaaacgtattggaatttatgggaaatgagtatgttagaatatgaatggaagaagtagcaacgatagtgatttataattatattatgttaacaaaggggtttggtgagtatagtggataataaaacaaaaataatttcaattgcagctgtttcggggggaggtaaaactacaattacagaaagattaaagcataagtttaaaaactcaaaagctctatattttgatagttacacatttgataaatctcctgctgatatttgtaaatggattgatgatggggcgaattacgacgagtgggtattaacaccattaattcatgatattgagcaacttatacaaaataataccttagactatattattgtagattatccttttgcatacttaaatagtgagatgcaaaaattcattgatgtaactatatttattgatacgcctttagatattgcgatggctagaaggattttgcgagattttaaggaaggtacaatagatgaaatacataatgatttggaacattacatgacatatgcgagaaaagcttatttagaggcaattcatactgttaagccgaattcagatatcatattggatggttctttatctgtaagtgaaataattaatcacgctgtagaggaacttggccgaagagaagtgattgtcaatggttaaatgtataacagatgctgttaggtggataattgaagtaagggagagataaatgtgtacactttatttcaatataattggcaagtaagagatgattggtttaagtggtgtgaacaactttcagaggaagatttactttgcaaactgggggcatgttagaaacattatttcatattgtagatgtagagtatagttggattagtgctcttcaaggataagaagatagagaacagcaatttaaagattatcaatcgattcaaaaagtgaaagcgttatttaatttatataaacgagaacttgaagtttttttgcagtcataattatctagcctagaatgctagcacacttaaaataagccgtataaaaagttaatcattgtgtgctttgattatataatgtcggcgaaataaatagtgtgaaggacagctatcttaacaagtgtttcatgtaacgttcatatactttaatttttataattaattaaatttgaattttgtttgttgttaagaaaaggtgagaagaaaataaaaaaagagggctaatgccctctttttcttttaatttggtaattaatcacagattggtatcccaagcactcttagagctaatgctacttgaagggaaatctctaatctagcaatttcaataccagctactgaaagaactagaaaaggttgtccgtttacaaatacaacgcaactatccatagttaaacctcctttctagtaatttactatagtatatgagtagaactttaaaatgtaatagttcaattgttggatttaatagaattaatagattaacccatttaaactaaacaaacgaacacaacgaaaggaaacagagatggatgtatgcctcaaaaaacataggttttaagacatgtaatgggatatgaaattcatcatattggtcagctgtctgtatgggcgaggaagttaaacttgcaaccagtttcagcaaatttgaagaggatgatagaattaaaaaccgacttgcatcttaagcgcaagtcggttttatatatataagaagatttcttaattgaaatcctcggattttttctgacgtatatgtaaaaacattaaggtggtaatgattaaaaaaatcattatagtttgtataattaaattttaaaactgaagcaatattgtccaagatgtaagggcgtctttaaaagcttggagtgcagagtacgaggaaggatcaaaaccatactgtagcaacttttttgtttcaataaatgaaatgttttcttcatctgcatctaatattactgaaattagtctagtatctccaagttttgctgtactgacaaaactataattaccgttagttgaaaaactagtttgtaagccatcaacaccttgaagtttaatgttttcattaagggaatatatcattttattcgtattgaaaacctgggaatctttgaaggtaaattggtaagaggttagtttcgtaatattcaatacatctggaaaatcttttactaattttgctgctagtttagctgcgtctatcgctgttgtagttgattgtttatctgtatcattattaattccagtagagtttagaaatggagatggttgtaataactttagttcttttgcttttttattcattaatactgtaaagttatcttcatttccagcaatgtgttctgctagagcgagtgcagaacgattattccctgccagtagcaatgcatgaagtaaatcacgaaccgttgttttatcattcgatgttacttgtatagggcttgtttctactcggaaaacttcgttacttatttgtactaagtcatctaactgtatctttctatcatttagttgctccaatacgatatattctgtcattaatttagataaagcagctgattgtactggagtttcttcattttttttataaacaatttcacctgaattagcatttattaaaatagctgatttagcttgaataatcggaccatttacataaaggtaaaaatataaaacgataagtgcagtaatgaaaaaagataataataaaatagcgaatttttttaagaattgcataagcgatcctcctattatgacatcaatactagtattgtaaaaaggaatgcttaattaggaagaaagaaaaggtaaagaatttctaaagaattataaaggattattaaattttgggcattaatggaaaaagttcaatttcttatatgataagaaattgaactttttatttataatattaacatttgtatgggagtagttttacagtgaatgttgttttttcatcatcactatatacttcaattgttcctttatgcaattcgactatactttttgcaatagctaatccaagtccagatccaccagtgtttgtagagcgagatttctcaacgcgataaaaacgttcaaaaatatgaggtaaatccgtactaggaataggttgtccgtaatttgttatatcaattgtaatcatattattgctttcataagcagtaaggtcaatatagcgaccttcgcttccataagcgatagcgtttataataagattttcaaacacacgcactaatttttcaccatcagctaataccatgagcttttgagatgggaaagaaggtcgacattctatatttgcttcttgaaattgtatacggaattgaacagttaattgtccaagtaactctactatgtcaataggaacagaatacaagcttaactctttattttgaacacgtgtatattcgaacaagtcattcattaatgcattaagacgagttactttatcgtaaatgacttgaatatagtatcgcaattctacttcatctctataattatcatgatggattaaatttacgtatccaactatagaagtaaggggagtgcgtaagtcatgtgatacatttgtaataagttcactttttgcttgttccgcttgtctttcttcatcaatggagacttttaattgttcaacaatttcattgaccccgattgctaattcttctagataattatgatttacaatagaaactttatgattgaagtttccatttgcaatataacgaatttcttctatcatttttttaatacaagtttcatagtaaagttttttctcgtggcgataaaaaatgtaaagataggatgaaaaaatagaaaataaaaacaaataagatacaatcatcatccataacgattctttaatccctttatacttttcataaccaaaaattcgaatgaattctttaccgagttcagttagagtaagtgaactctcaattacactcgtaacgaggcgataaataattaattcagtaataggcgtgagtgtgatagctaataagagccaaaaaataagtttccatttagggatatcttttaatatatcaaatgcttcatttctcaattttatagccaactccccatgcccatcaacttaaggatagaaactctacggttttccattaattgaaaaaacgtcgttaggccagttttctggtcgtgttcaacagacctataaacattctgtgccgcgtttctttgttcctgagcatggcactatgtttactcttgcgcttgttcgttttccgcctactgcgactaaagagattcagtaccttaacgctaaaggtgctttgacttataccgatattgctggcgaccctgttttgtatggcaacttgccgccgcgtgaaatttctatgaaggatgttttccgttctggtgattcgtctaagaagtttaagattgctgagggtcagtggtatcgttatgcgccttcgtatgtttctcctgcttatcaccttcttgaaggcttcccattcattcaggaaccgccttctggtgatttgcaagaacgcgtacttattcgccaccatgattatgaccagtgtttccagtccgttcagttgttgcagtggaatagtcaggttaaatttaatgtgaccgtttatcgcaatctgccgaccactcgcgattcaatcatgacttcgtgataaaagattgagtgtgaggttataacgccgaagcggtaaaaattttaatttttgccgctgaggggttgaccaagcgaagcgcggtaggttttctgcttaggagtttaatcatgtttcagacttttatttctcgccataattcaaactttttttctgataagctggttctcacttctgttactccagcttcttcggcacctgttttacagacacctaaagctacatcgtcaacgttatattttgatagtttgacggttaatgctggtaatggtggttttcttcattgcattcagatggatacatctgtcaacgccgctaatcaggttgtttctgttggtgctgatattgcttttgatgccgaccctaaattttttgcctgtttggttcgctttgagtcttcttcggttccgactaccctcccgactgcctatgatgtttatcctttggatggtcgccatgatggtggttattataccgtcaaggactgtgtgactattgacgtccttccccgtacgccgggcaataatgtttatgttggtttcatggtttggtctaactttaccgctactaaatgccgcggattggtttcgctgaatcaggttattaaagagattatttgtctccagccacttaagtgaggtgatttatgtttggtgctattgctggcggtattgcttctgctcttgctggtggcgccatgtctaaattgtttggaggcggtcaaaaagccgcctccggtggcattcaaggtgatgtgcttgctaccgataacaatactgtaggcatgggtgatgctggtattaaatctgccattcaaggctctaatgttcctaaccctgatgaggccgtccctagttttgtttctggtgctatggctaaagctggtaaaggacttcttgaaggtacgttgcaggctggcacttctgccgtttctgataagttgcttgatttggttggacttggtggcaagtctgccgctgataaaggaaaggatactcgtgattatcttgctgctgcatttcctgagcttaatgcttgggagcgtgctggtgctgatgcttcctctgctggtatggttgacgccggatttgagaatcaaaaagagcttactaaaatgcaactggacaatcagaaagagattgccgagatgcaaaatgagactcaaaaagagattgctggcattcagtcggcgacttcacgccagaatacgaaagaccaggtatatgcacaaaatgagatgcttgcttatcaacagaaggagtctactgctcgcgttgcgtctattatggaaaacaccaatctttccaagcaacagcaggtttccgagattatgcgccaaatgcttactcaagctcaaacggctggtcagtattttaccaatgaccaaatcaaagaaatgactcgcaaggttagtgctgaggttgacttagttcatcagcaaacgcagaatcagcggtatggctcttctcatattggcgctactgcaaaggatatttctaatgtcgtcactgatgctgcttctggtgtggttgatatttttcatggtattgataaagctgttgccgatacttggaacaatttctggaaagacggtaaagctgatggtattggctctaatttgtctaggaaataaccgtcaggattgacaccctcccaattgtatgttttcatgcctccaaatcttggaggcttttttatggttcgttcttattacccttctgaatgtcacgctgattattttgactttgagcgtatcgaggctcttaaacctgctattgaggcttgtggcatttctactctttctcaatccccaatgcttggcttccataagcagatggataaccgcatcaagctcttggaagagattctgtcttttcgtatgcagggcgttgagttcgataatggtgatatgtatgttgacggccataaggctgcttctgacgttcgtgatgagtttgtatctgttactgagaagttaatggatgaattggcacaatgctacaatgtgctcccccaacttgatattaataacactatagaccaccgccccgaaggggacgaaaaatggtttttagagaacgagaagacggttacgcagttttgccgcaagctggctgctgaacgccctcttaaggatattcgcgatgagtataattaccccaaaaagaaaggtattaaggatgagtgttcaagattgctggaggcctccactatgaaatcgcgtagaggctttgctattcagcgtttgatgaatgcaatgcgacaggctcatgctgatggttggtttatcgtttttgacactctcacgttggctgacgaccgattagaggcgttttatgataatcccaatgctttgcgtgactattttcgtgatattggtcgtatggttcttgctgccgagggtcgcaaggctaatgattcacacgccgactgctatcagtatttttgtgtgcctgagtatggtacagctaatggccgtcttcatttccatgcggtgcactttatgcggacacttcctacaggtagcgttgaccctaattttggtcgtcgggtacgcaatcgccgccagttaaatagcttgcaaaatacgtggccttatggttacagtatgcccatcgcagttcgctacacgcaggacgctttttcacgttctggttggttgtggcctgttgatgctaaaggtgagccgcttaaagctaccagttatatggctgttggtttctatgtggctaaatacgttaacaaaaagtcagatatggaccttgctgctaaaggtctaggagctaaagaatggaacaactcactaaaaaccaagctgtcgctacttcccaagaagctgttcagaatcagaatgagccgcaacttcgggatgaaaatgctcacaatgacaaatctgtccacggagtgcttaatccaacttaccaagctgggttacgacgcgacgccgttcaaccagatattgaagcagaacgcaaaaagagagatgagattgaggctgggaaaagttactgtagccgacgttttggcggcgcaacctgtgacgacaaatctgctcaaatttatgcgcgcttcgataaaaatgattggcgtatccaacctgcagagttttatcgcttccatgacgcagaagttaacactttcggatatttctgatgagtcgaaaaattatcttgataaagcaggaattactactgcttgtttacgaattaaatcgaagtggactgctggcggaaaatgagaaaattcgacctatccttgcgcagctcgagaagctcttactttgcgacctttcgccatcaactaacgattctgtcaaaaactgacgcgttggatgaggagaagtggcttaatatgcttggcacgttcgtcaaggactggtttagatatgagtcacattttgttcatggtagagattctcttgttgacattttaaaagagcgtggattactatctgagtccgatgctgttcaaccactaataggtaagaaatcatgagtcaagttactgaacaatccgtacgtttccagaccgctttggcctctattaagctcattcaggcttctgccgttttggatttaaccgaagatgatttcgattttctgacgagtaacaaagtttggattgctactgaccgctctcgtgctcgtcgctgcgttgaggcttgcgtttatggtacgctggactttgtaggataccctcgctttcctgctcctgttgagtttattgctgccgtcattgcttattatgttcatcccgtcaacattcaaacggcctgtctcatcatggaaggcgctgaatttacggaaaacattattaatggcgtcgagcgtccggttaaagccgctgaattgttcgcgtttaccttgcgtgtacgcgcaggaaacactgacgttcttactgacgcagaagaaaacgtgcgtcaaaaattacgtgcagaaggagtgatgtaatgtctaaaggtaaaaaacgttctggcgctcgccctggtcgtccgcagccgttgcgaggtactaaaggcaagcgtaaaggcgctcgtctttggtatgtaggtggtcaacaattttaattgcaggggcttcggccccttacttgaggataaattatgtctaatattcaaactggcgccgagcgtatgccgcatgacctttcccatcttggcttccttgctggtcagattggtcgtcttattaccatttcaactactccggttatcgctggcgactccttcgagatggacgccgttggcgctctccgtctttctccattgcgtcgtggccttgctattgactctactgtagacatttttactttttatgtccctcatcgtcacgtttatggtgaacagtggattaagttcatgaaggatggtgttaatgccactcctctcccgactgttaacactactggttatattgaccatgccgcttttcttggcacgattaaccctgataccaataaaatccctaagcatttgtttcagggttatttgaatatctataacaactattttaaagcgccgtggatgcctgaccgtaccgaggctaaccctaatgagcttaatcaagatgatgctcgttatggtttccgttgctgccatctcaaaaacatttggactgctccgcttcctcctgagactgagctttctcgccaaatgacgacttctaccacatctattgacattatgggtctgcaagctgcttatgctaatttgcatactgaccaagaacgtgattacttcatgcagcgttaccatgatgttatttcttcatttggaggtaaaacctcttatgacgctgacaaccgtcctttacttgtcatgcgctctaatctctgggcatctggctatgatgttgatggaactgaccaaacgtcgttaggccagttttctggtcgtgttcaacagacctataaacattctgtattccttagctgatattgttagtttcggcgtcgctcctgcgcttttatttcatacaatggcagcaccttctattttaacttctttggcatttatccttttcccaacaatgggtgctttaagattagctaaatttagtattcaaccaactattggatattttaaagcattacctatttcagctgcaggattatcatttgctggtataggattgttttcatatagcaatgcatagattactttaatcctcgccctcttaatcgtaagtcccattaggtttaaaaaatttcaattgaagtcacgcccagcgccataaaggagcatttcaaatggatttaacgcgtcactatgtataaaaaagcgggacaataatattaaattcggtgccattcgtaaaaattaaaaccttgtatttatggctattgggttaattcatcgatatgttgttctaaaacttcaatacacttttaacaggagcccctttatcaagagagcacccgttcttattttttcttcttttctgtcggttggctttgtttagcaaaattagatgaatcatcaaaattcggttgctttttaccagcattattacttctaccttttcccatatgtaatgcacctcccctcctccttactattcccaataaaaaaattctcttgcatccaagagaatttttgattgggttcttattaataatacccaattacttccaacactgctatttgataaaagatggatccaatgtcaaattctttaatgctgaaaaaagcattacattttcatatttagatcaatttttagatggaccacctatttatccgaatttatctaattacacgatccttccggaaggaaaagtatttatctatcatcacaattatttcataatgacagattccacgcttcatcttatagataaagacatattgcaaaaactttatttattaaagaactgtataccaatttcaaaaattaatttatcctactttaaaatttgaccccctatttcatcatatccctctcactttgtcgaaaaatacttagaataatacctatatttaaaagaatttcttagtggaattttcatcatcaataattattatctaaaagatactaatctaaagaaaactctactggttaaaagctaaccaatagagttttcttttttatctaaggattcttttaaaaagtgtcttttttatagtattttaaaaagaattcctcatactaacaccttattgttgcggctattcatttatttcaatatgatacttttccatctcgtatatgcaatagacaatgatagctaaactccaactgacaccataataattatgtgtgtagaagtcatatcccgccttaatacctttctctattacaacaaatgtaaatcctaaagccacccatttgttaattttcatcttaataaacgttaaagagataattattaaaaataaaatatttgtaagatgatttatcattagctcatatttttgaatgtatactgccatcatacaagcaacgatattagtcgcaatgccaaaggcaaccatcgctccccaacccctgtccgaaagtcccattcctgagtcagtcccttcctgaacaaaaatccttttctttaattcgttccttcatcctattcaaggtatgctaaattatccttgtctgatgaatatctatttatcttttcatatagagcaaacaaaatttctacttataattttttctttattagacaaactatgtctaagccgtttgaactagcggcttcactcttctggtaatgagatagcacaatttattgaattgactaactcattcaacccactggcaccggcaggcaacaaaatagttgtctgccattttcatgtatactttttctaatttcattacaaaccaaatgtgtgctgtattgatttcaaaaggacagaatttcattttttaaaatgtaaaaaagataagatcctatctacttttggtataggactttttcttttcacacatactatttttgaacttgtttaccaatacgtgtcctaatggtgtcttgaattcctcctaaaaagggctgcagatacgactgcatgcccttttatttacgttgctgctctatattgagtaaaataattaaaaactaaaaatgtaatattacatattttttctgttcagattatgttaagattcacttcatagtcgaattatggtttcgtatctaattcagcaatatgtgaactgtttacctaaagaaaagacacccaaaaggtgtcttttcttcttttaatctaaaaaacatttctcctatttagtaagatccaattagccctctaacctaagcctcatatttaaaggcaatttaatcatacactcaagagttttcatctatttcaatatacttataacttaatttccaatcacatttccagcactatatttgctttcttacagaatttctgtcttgttcttaattctgtcaaaatcctcatgtagctatacaaagaatatatgctactatgatattaagaaactatgcgttcccttaaccctgtatccggccctgtatttattacagggtctttgtttattttatttacttttattggcttataagagttaatacacaaccattttcaattaaaaccgtttaaatgttagttagaaattgaaataatatatctattagcttttttaacaaatgaaatctactattagatttctaaatgtatactgtactaagcaccaattaacactatacaaatagtgtcaactatgttaattgaatattggtaatagtaagtataaatattatcaatttactatatattacatttatgtaaaaatagacgtatgttgagcttattcaaaatctttcccctaataaagatttgaagtagcatttcatgattctccttactgttaatatgccttgaaaaagaaccctatagggttctttttcttttcattataacctcagtaagtccttatttaacatgcaaaaaggactgctaattatttgcagcccttttacacgttaatatacacttgtattacatgctgaaaactttattatattaggtatttataccaactaaacatgccattatcatttagatatataacacttcaaagtttagaagtatacaataacaaatctttcccagcttccagctacataactagtaactgttaattctctaccaccatttgctgatatatatctaccattacttagtgcttgtaatacatatatcctattgtctccaccattatataagataaacttttcccatgcaccaattgatgtacgatctgctactattctaccatttgaatcaaacgaaacatacttttacgtatgtttaacctacagccctaaaatttctacaatctgacgagctttattattatcaatataataatgcatctctaatccttttctttctgcacggattacaattccttttaactttgctaaatgttgtgaaacagtggattgtggaagtttcaatatttctgttaactgtgtaacattgcacattttataatgcattagctcacttataatttttaatcgaaccggatgcgccattacccttattacatctacatcttcttcgcttattttagctaggtcattattagatattactgttaacatttctcattctcctttattattaatttctattttcctattatccttataagtaatacttatagataattacaatttttcctgttgagaaaatatattctactcaatacaaaaagacacctattcaaaaaacagtttttaccgttccaatgaattggtgtcttgaaattttttagccacactttatttattcatattttaatctatatatgattttgaatgctgcttaatatacgttgcaaagcaaaaggaatatttccatccctttttaaacataatcataaaataagttatataaataatttgttatatttccatgtaccctagctgatataatgtataaggaaattattgattaattaatggttaacatatattagggaggtacataagtcatgatagaggtaatcgcgtcactatttttagtagtcgtatattttattagttatctcttttcaacaggagaagataagaaaaaagcaaaagctgaattaaaagaaattgttaatggtactcatggaaaaatattggtaggatttcttggaggtgcggcagttacaggaatatttgtagtcatttggatcttatcagagtaaacctttcagacattttagcttatataacgtataatgcagttattggttaattaagaagaaaagcattagagaaaacaagatatgaaataatatataaggatctcgccttttctgttgaatggtgagttttttaatgtacaaaaaaaagacaccctaaggtgtcttcctccgacttgaaccactttaattttatataaatatacacgtattacccctttgttatacgtgtaaacacatcctataaaacagaatcttctatttacaccagattgttagttcacaaaatatcaagagatttgagatcaatatgttacgtctttcaaaagaatctgctttatagaatgtatccacaatttatattttactacatgtaatatttatatagtatatttttgcgaatatgtataattgcataaagtttacgagaaaaagagagtataatttgatattgtgtaatgaagataaaacccacctacggaaataggtgggttattttatattggtgagcttgtataagtatgatagaataagaacaactatatattgtagggtggttggttgcgatcctttctcttatttatagggaaaggaggtgaccgaatggacattctttttcaaatattattagaagtatccaaaactattgtctgagagatcgcagtttttggatttaaaaaagttacttctaaaaaacagaagaagaccacccctaagccagcaaagcgtgggcggtcttctaaaaaacgcaaaaattaatttttaataaccgatcaccttacggtagcagttacttgaagagatgttgacgcatctcttcttttattatatacgtacagcaacattgaaatacctttaaggaaattataacaaatgtaaaaaaaaaagaaaagcccactggtaccagtggggtattgtttgggtactactatctcattgcacaaaagggcctttgcattaaaataatatcatattcttaaagttgttatattgagaattgaactacccccactttcacttcgtttagaagtgagggattcctaagtaaagagttctatcgaactctaattgattaggctaaccccgcagtccttgcggttagaagccttatcgcttcattctttagattgatacttgcgttaatatccctatcatggtgtgtacgacaagaaggaaaaacaccccctatttatataaaaaactccccttgacttctcatagttggtctttcataattaagtttgtcattttctgcaaactactgaattataaaactactaaatatatttttccttgtaatcaatttttacattacacatattattacaatctattttttatacaattccctgtccttctcttctgtttgaataacatcaataaaaagtggatatgtaaaaatcttttgattattgctatagaccacatattcgtatttgccactctccataactggaaatcttatttctattacgccatcaataccaggagtcattctgttatctcgaagattttttaattttggtagttgaccactataaacaatttcctcgttagaattatatacaaggattttgttattaatttcctccaatccatcttcttcagaaaattgaaatttgaataaaactgatgtaataacagaagccggaagtataggaacagtaattttatttagaatattataagcagtatgctttttttcttttggatcaaacattatattttctgctattaaaatttgacatgaaatattattcttcatacttttctctccttattcatacaaattaacgaaaagtaagcgctatcatttttgggtaattttttactatctttctgataatgtacatattcatactttttaaaataacctatactgcttttcacatctgtactatcaattaccatatgatttctccagtgcttaacttttcttttgtatagccaaatcggtgctgttaatataacaacatatttttcatcaattgtttctagaagtttatcgatattcttaaaataataattatcatagctcagaaaaagaatatgatattcctccatctcgggtatgtgcaaactatcaattaaattatctatttcatatttttcttgcacatgtagtcgtttgttataataatgtgcataaacaataagtacacatgctattaaaccactaattactaacatcagatttatagccatagtttaatctttccctatcataattttttaaagatatgagattgtacaatagcacagtatatacactaagtagccctaagaataaacttatttctaatgttcgaaaagagaaaggtaacaatacttttattattaataatattacgatgattgaatttcttgcaattggagacttattcataaactgcatcttaccaaaacagctacaacttgttttctctaacttatataaatgtttttttctgataattaacaatataaaaccaatcattaaagcaatagtacctatttccttatatggataatatatatttaatacaaacgtgataaaaatgcacaattctaaaattagtaccatataactaaaaaatagtatagattttaatggtaaaatattatataaaattaaatcacattttaaaccatggatagaataacttttcatgtagaaagatgcaaaaaatataaatgctatactcaagtcgatacacgacgatagaatattaatttgactcaccttctaggatagaaagaagttcaactgcattttctatatcatcaattactctcatagcagttatcctgttattttcatctattagacaaaaacttggcgtttcctgaaagccaccttcatcaatcaattcatcaccaaaggagattatattaaattcaaacccaaagtaatcttttatctcatcaatatcttcaatagatccatcagttactaatacaaactctcctttatatgaatttgctatctctgatattttcgggagtagatcaatacatttcatacagcttaaagaaattgcccctagtagccaaggactcttatttgaaatattcattaaatttttaggtaatattttacccactgttaaataatttgtattagattgaggtggcactctatgtttttgaaacatttctttaaacccttttatcattctggagtcctccttaatattctataatacatttaaatttagttataatgtcttcaaacatattatcttgatagcctatttctgcatataatacttgtcctagttcattgacaaaatacgttctagggacaccactaactttaaattctttcttcatcttatctttattacataaagatactaaagctctaccttcaaatgtggatttgatatattcaaagttttctgggcttgtatcgattaaaataagaacatttaatgatgaatctttagttaaaaatttatcgagcgcttccatggaaggtaagcatccttcacatgacgtactataaaatagaattaagagatgttttttcaaaatatcatgtaatttgcacgtattcattgtatctatataaacattttctatatattctcctacatctaaacttttaggaaacctaaaaaatttcctatgcccttctagaattgaatccatagtatcctccttgttttttatttttcatacaattattaagcccttaaatttctgctcttttctacaataatccttaaaatttttatcatatctaactaagaaaaactttaacatacatttcttttaattggaatatttgtaaaattttataaagtttttatggaatattcagggaattaatctatttttaaagctatacatttttaatagctgatactgaatatcttctggttaattctggttttactaagaaaaacaatttaaataataatttccaaataataacactaaaaaaagaatgcctttctatttaaagaaaatggcattcttttttaatttttgctaagaatataaatctattatctattattttctcaagatatatctcattacaaaaatactatatagtagatcaaaatcatactcgcataatatgaatcatcaatacaataaaattcatcatagcatgtactatataagaaactaataattgttttgattgtttatatacaaaggccaatacacaaccaataaaaaaataaccaaatataaatgggaagtcaaaatgcattattgcaaaaaacaatgcactgattacaatactccctacctctttaaatttcttcattaaaatattcatagtagcatatcggaataccagttcctctaccaatggggcaagaattacaattgatataattgcaataggtgaaattgatgcagctgcaactatactagatgtgttttctgattgcgtagaaatttggaataaacttttatctaaaaaactaccaattatctgtgcaaggaaaactaaaacaattccaactagaatccatccacatgcggtttttgataatttaattgatagtatagatttataaatatgtttttctttatatatagtaaaagtgataattaatataagcagaaacccaattagctcccaatgtaccaaaatttgttgaatcgcttgttcttgattctcatgaatatcataccaacctgtcttagctaataactgcacacctattattcctacaaattgattcataataaaataaataagaatgacataggccgatttatgtatattagtagtattcatattattatattcatcacccttcttctttagacatttaccatcatctacaaatcctattctgaatttttaaaattataaaaacataaaaacatcatattttttattacacttcggaaaggtttctttacgctaaagtaattctttccttcataggaattatctcacaatctacttttactaattttccactaacaaatatctattacccaaacaaaaacaaaacttctttaaattttataaagggttgtgctttacatccacaaccctcgcttttctcttaatccacaggcacttcttcttgaccatgtggaatttgtgcaattggtgttacaatttgtgcatatttgtttacctgcactttaaattgtcgtggttctaaaaagtttacctgttgaattaaaacttcaatatgaaacgtatctacttttttcccacgttcaattttggtaattcgtgcattgtaaaacttatccccatttaggaaatatcgttgaacagcttctgtagcaagcatacgttcattacttgtcattttcattggttcaataccaaatccagcctttgtaaacaaatacgggacatcataactactattagaaatttttcgtagtaaatcctctacagcttttgtctttgcgatatattcctcttcttttgtatcaaatccctttggcttatctccaagcatctcaatttcatcttgatttacttgctcttcctcttgtacttgagatttcatcatgtaacgatgaatagtattataggtagtaacacctaccactagtacaataattcctaatatgaccaagtacttacgaggcatattggataaaatgttgattattttcttcatctactctcatcccttatcagtctataacattacggatttgcgtcatatgttgtcctcttgccgtatagtttagacctgtaatttgtacacccttattatcaccaatatgaatcattttctgatttcctaaataaatagatacatggttaggattttcatagaaaattaaatctcctggttgtgcacgaccgatatctggcacctgttttccttgtccaatttgagcacctgtccaatctcctagctgaacacctatactggttttaaacacatattgtgtaaatccagaacaatctgcactacctgcagctggatttctagcaccggacacatagctcactttcccttgcccaagccatttttttgcttcttctaataccttttgtcgtttagcatttgtcattgtaggagcaccacctgatgataaccctggatcatcatttttcttaaagaatttcattggatccgttggttggtcattaatacgaatttggaaatctaaatggacagcgtatccaaacatattaagaacaccaccaacatagttagccccccccatttccccaataatctgtccttttgttaccatagttcctggtgcaactaagattttacttaaatgtaagtaacgggatacaacgccatttccatggtcaacatagactcctaaaccaccgttgtttacatttcctgttttatccgtaaccataccagcttccatcgaccatacggggtctcctggttttccggcggtcatggccccaatatctacagcattatgcggtttgctagcatgaatttcatcaaatgtacctgtaatacgccctgatttcgttggccatttccaacctttatcagaaatccattctccagatacatctgccacacaacctaaatctttgtaatattttaaaactttggaaacatatgtgtagagtaaacatccagcgccttattacattcctgtgataggtttccatcacgggtttataggtaaatccctttcctaaaaaacctaactttatcatacgaggaggtggggataatggacaagacggaaacaagggaaatagtaacacagaagattgaaattagagaagatgataacggaaatcggacacttataggctatgcagtaaagtgggaaaagaaatccgtagttatgggatattatcgtaagtttcgtgagcaatttaaaaatggagcattcacagaaacattacaaaatgatgaccaacgttttttatggtctcatgatacatctaaagtgctgggaagaacaaagaataatacgttacgtttgagcgaggatgccgtgggcttacgctttgaattggatttaccagatacaactctaggtaatgacacttacaaatctattaagcgtggagatgtagatggtgtttcgtttgggtttagcatgataagcgaagaaatccaagaaccagatgatgatttgatgctacgaactgttacaaaagcaaaactattagaagttagcgcagtagctttcccagcttacccagattcagaagtaagtgctaggggatatgatccttataaacattttacagaagaaaaaaagcgctcggaaaagcgcagaagactatatttacaaacattattataaaaggtggactttgaacatgaataaagaacaattattaaaacgtaaatctgaaatcagtgaattattaagtgatgaaactcgctctattgataaccttgatgcaattgaaacagagttacgagatattaataatcagttggcagcgattgagaagcgtgaacaacttttaaatgaagcacgttcaattaatgaaggaaatgcagctggtactaataagattgaaacatttaatacggatccatcaaatgaaaaacgtgaacttggtacaaatacagttgaatatcgtaatgcttttatgaattacgtattacgcggtgaaacaattccagctgaattacgtgcaaatgctgttacgaaaacaagtgacatcggttctgttatcccacaaacagtattagataaaattatcgaaaagattgaagcggtaggaatgattctacctttaattactcgtacagctattaaaggcggcgtaacagtaccaacttcaacagttaaaccagtcgcaacatgggttgctgaaagttctggaagtgataaacaaaagaaaactacaggaagcattactttcaactatcacaaattacgttgtgccgtagcggtttctcttgaagtagaaacaatgtctcttgcggtatttgaaacaacattaattaataatattgtggaagctatgacaaaagcgattgaacaagcgattgttagtggtgatgggtctggtaagccaaaagggattctagcggaaacacctgttgacggacaagcattagatgttgcgaaaattaactacaaaacgttaacagatgcagaagcggctttaccacttgagtatgaagcaagcgcgatttggacgatgacgaaaaagacatttatggaattttcggcaatgacagatgcagacggccagccgattgcacgtacaaattacgggatttccggtaaaccagaacgcattttattaggtcgtccagttgttctatgtaattatgttgatagtttcgcaacggctactgaaggaacaacatttgcattcttatttaattacaaggattatattctgaatacaaactaccaaatgggtgttaagaaatatgaagacaatgaaactgacgatcaagttacaaaggcaattatgattgtggatggtaaagtagtagacaaaaactctttagttgttttaaaaaaagctccagcagcttaataaaggagtgatacaatgaatcatttagtcttgaatgctttcattgataaagaaacaaaagttggatattcaaaaggcgatatgtacgagtcaaatgattcggaacgtgttgcctttttaattgaaaaaggattcttaaaaggaaataaagagatttctacattccctaagcatactggcggtggatggtatgaattatcgaatggtgaaaaagtgcaagggaaagaggaagcgatgtcagctgaacaatcattgaggggtaacgaatcatgattttaaaagatataaaaaaggcattgcgcatttctcatgatgcccttgacgatgaaataaacgatgcaatagaggaagctcgacacgacttaatgttgtcgggtgtttcttctattaaagcgaatcatgacgatgatccgttaatcaaaagagcgataaaagtatattgcaaagcagaatttgttgctgaggtcaaagaggctgaaagattccaggcatcgtataacatgttgaaaaatcatctcactttagcaggtgattacaaatgaatgacattgtattctttccagttgtaacgactactacagacgatttaggacaaatagaagtagcagaagagtttacaagacaagtattttgtgagaaaaaaagtgtttctcaaaatgaattctttcaagctggtcaaaatggttttaagcccaaatgtgtattgattgtttacacattggattatcaagaagaacagaaagtacagtatcacaacaagaaatacaacatttatcgcacatacgaaagagacgatgaaagaattgaactctattgtgaggtgaagacaggtggctaatatcgatgatttatccaatgaaattgctagggaactacaaagatatgccaatgtaattgaggaagacatggaagtggcgaaggaagaggtagcggataatttagtgggtgaattaaagcaaaaaagccctaaaaatacaggtaggtatagtaaaggttggcgaaaaaagaaggatgggaacgcaattattgttcataatgctttaaaaccgcagcttactcatttactggagaaaggtcatgcgaaggcaaatggtggacgagtaccagcaaaggttcatattgcaccagctgaagaacatgcgattcatgattttgttgaacgtgttgaaagggcgattgggcaatgacattaggtgaactaaagaaaattcttgaggctacaggttatcctgtggcttattcgcatttcactgaaacaccaggtgttcccgtaccttcaccgccttatgtttgctactttgtagatggatcacctaacatggcagccgacaataagacctatcacaaaataaatgatgtaaatatagagctttatacaactaagaaggatttagttgcagaagccaagctagaacaagtcctggatgattatgagattccatatgagtcatatgggacttttattgaatctgaaaaactatttcaaaaaatatatgaaacgaggttgttgtaaatgaatgaaaacaaggtaacattcggtttgaaaaatgtacattacgtgccattagatattaaggatttcttagttacatttggtacaccaattccattacctggtggagtggaactaacatttgagccacgcggtgatttaattgaattctatgcggatgacatgctttattacgcagcaagtaataatcagggttacgatggaacattaagtattgctactatcccagaaaagtttgctattgatgcacttggtgaggaattagacgaaacagatggtgtattgaatgaattggctgatgcaaaaggaaaaccattcgcattattatttgagtttgatggtgatgtcaatgcaactcgacatgttatgtataactgttcagcaagtcgtccaacacttgcatctaaaacaaaaacaagttcagctgagccaaatacaaatgaactgaagtttgtttctagtccaattattttagcaccagggggaagacctatggttaaaacaaaaacaacatctaaaacaacgcaagaaatttataaaaattggtacaaggaagtgtacgttaaaaaaccagcagcaccaaaaggagcgtaatagtaaatggaaaagacaattacaatagatggaaaacaagtccgattaaaaagtacagcagctactgttaaacgatataaagcacaattcagacgtgatttatttgctgatatgtttaagttagggattttgtctccttcaaatcctcaagagggttcactagccactattgatttagctaatgcggatttaagtaagctagattttgaagttgtatatgatttagtttggttatatgcgaaaacagcaaatccagaaattgatgatccaattacatggttagacggttttgatgaattccctatctcagagattattccagaaattatggatatgattcaaagtacgatgggcgcaaaaaaaaaataaagaaaagtaatggagagcaagggacgttcagtgatgaagaattaaccactgatacgttccttgctctttgttataaagcgaaattaacgcattgggatctggacgtcatgacgattggtgattgctttgattacattgctgaattcgctgaaatggagaatccagacaaagaaaaagtcagaaaagcaaaccaaaaagactttgattcattctaagaaaggggttaaattatggccggaaggattaaagggatcaccattgaaattggtggggaaaccacaggtcttcaaaatgcattaaaagatgtgaataaacgcagcaatgatttaacaaatgaattaaaagatgtagaacgtcttttgaaatttgatcctggtaatgtggaagctttagctcaaaagcaaaagttattgacgcaacaaattgaaaatacaacggaaaagctagataaattgaaggcagccgaacaacaagtgcaagcacaatttcaaaatggaaaaatttctgaagaacagtaccgcgcgtttaggcgtgaaattgaatttacacaaggatcacttgatgggctgaaaaataagcttggtaatatgaaatctgaacaagagaatgtagcgagttcaacaagacaattagaaacgttgtttagtgctacaggaaaaagcgttgatgattttgcaggcgcattaggtaatcgtcttgtaaatgcaattcgaaacggtgcagcaacaagtaagcaattagaacaagcaattgggattattggacgcgaagcattaggaacagaagctgatattgaaaagttacaacgtgcgctacgatctgtggatgctgggaattcaattcagcaagtacgaaatgagttgagagatttacaacaagaagctgagagaacagagaagaagtttgaagggctccaagtaggacttgaaaacgtcattggtggaatggcagctggtggcggtattgctagtgcagttgaaaaagcaatggatatgtcaaaattgaaaactaagattgatatcacttgattttgtacatgcttaaacaagcgaaaatgtacatgtttatcttgacatttacaccccccatgatattaaaatattttaagtgtattttagcattcttacaaaaaaacagagaagatattagccactatattataaagcgcaaaaacaaactagtttataaactagtttgtttttgcattttacttgatttaaccatccattggatcaataaaaaagtctttatcacactccagtagaaacgtgggattatatatttaaaatttctcaatgtgtgaaataactaaatatggtaaaattatatttgcgagatacatattattaaaattaagatggttcaagtcgaaggaaggcaccttagggtgtcttttctttataaaaaaagacgcattacgcgtcttaaattaatttttactatattgttctttagattttacgctccgtccaccttgttaagcgaaactcaggaacgtacagattgtaaaaaagattagctgcagctgccagctaatcttttttctacaatctgtagttatcgagttgagtaaaggtggagcggtggcttacggaatgtaggcaactgccgtacatcccgtgccatgagccctaccagttttcaagttaaaagcaactactaacatttcaatcaagacaatctaacttataaactagttgacttgatctcgcatctgttctcctactttttccagactgaaagattttaatttttcccaactctttttagggtgtctcttccttgtatgtcttttcttttgttccttcttaatagcatctatcaacatttgtgggctatgatgaaagtatgcttgattgtagccgtcctcaatcataccgaaataatcacattcattgtcaacaaagtaattatctacaattaatttctcaaattcactttcaatataaccccaattgtgtactttactatcagaaattgaaacaccattagaagttatttcgagcttatccaataaatagtccatatactctcttgatattttctctaattcctcaattttcttcatatgttcctgattttccagaataaattcaatatacttcttttccatcactctcagccccttatttctttactgtcccttatctttatatttttccttctagcacttatgcactttctctttatgattttactctaaccagcatactaacataaaacccacgttaagaaataattacaagaatttatatagagaacaccttgcgttctctcaaagaacaacagttaaccgtactctatattgccagaacacgttcgagaacgtgttcttattctgagttctaggtggcattatatttgtatagatatttccccttaagaacactagttgctcttaaggggaacgacatttattatgtgtaaatcacatcgaaaactaaactagttgtcaatttagtttaaactagtttataaactagtttatttatatttataaaaaattagctattaatagctaattttttatatcgcttttcattttattgtatttttctaaagctttaagcgctgctgattttggcttagtacccatttctgaaaccttcggttttattatttgctcacttacattactttcattgccatttccctttatatcagaagatggtatttcttgagcgatgtgagctgatggtacttcaaccttaccgcctatagtatcttcctctttatccgaaatcggcatctcattcgtattattagttttaattattttgttaagctcagatgtaccaccaatcattgttaaagctaaatttaatagcatctcttgtcctatactactagatagcatttcaatttggccctgagacaaattttctgtagttaacgggatatacaatgctcctgtactaccgctatttctattgaacttcaaaccatcttgaattaatttttcagtaagtttatttcgacttatacctaattccgatttcatttcattaaattcattaatccatttagcatctatagaaggtgtaaatgttcttcccttacctgcctcataaccgacgttactcatatataacaccacacttcatattcttatatagcaaggaagaaggtgtgaatccaccttctattatgcttcaacgccttctttatttaattgctctaatagattagctattaaatatgatctacttgtaaagtatgctgactcttgaatgtttttaggtaaaataaagccatcttgttccttcagatctcttaaaccagcgtaaccaaataaaactccaccaccaactacaatgtttttatccgcatttgttttaaaccaaaacttcattagagatgctttttgatcttctgcatattttaacatcccatccattacaatatctgtaacattctcttttacagggccccatttcacactaaatgtcggcttataagtatcatcttcaatcattttctctacttcaggcatcactagcctttgaataaaatcttctcttgttttaaaaggtgactcaatttcatctgtcatgaaactttttaaaatctcattttccatgaaacgttcttttatattctttaaaatttcatcaatatacttatttgttcctaaatccgtatttgtagataattttttatttaactctccatcttcaaagaaagcattatccgaagtacctgcaccaagatcattgatagcatatgattctccaatttctgcatccattccttcaacttccactatttcaccgtttacaatgtcaaatagtattgccaagacagaggaaacaccttcaacattcattgttccatcattaatcgtaatttttatctttttaccctcatatgtaccatctaaaaattctacagtatgttctccatagagcatttctaaaatttgttcttccccacgtagtttataatcttcaattggcattccaccactaaaaggaacagaaacttcttcttttccaattctcgctgctgccaccgccatacttgtgaataatggaatcaaatgtaacttcttatttttctggctaaatttatcttccgtttttcccatttcgtctacagttggttcttgacggtcttcttgatctttagcatatgctcccacataccacgctctgcttcttgcatcaccatctaaagaattactaattatacgaacatgtaataactcgatgtcttcatctttctcatttacgtaatcatttttcttagaaggtgcagattttaaatctatttttgctggcggcgcttctgcgattactgttggaatagcaaaagattcaatattacctttttcattcaagaaactaattttcgctttaatattacctgtatcaaaaccaccaagtaacatgtttttagatagcatttgctcaaccattatattttcctcctacaactagtttatagtttagtttaaactagtttatcaactagtttaattaatgataaaaaaatttatatccatatttaacttttaaacataatgttcgtgaagagaacagtagttgttcgcttcacgaacacattattcacttgctttgtataaagaacatgttctgtaacgtgttcttctcttgaaaagtaatttcgtactcaatatgtattagaggacatcatcaggacgataatgctctacgccagtacactttttaaagtccttgctattccatgtcaaacaaggaactccgttcttagtagatacagctgctaaataagcatcagcaaaatcaattctattggttttatattcatgtaatgcttttaatactacatcactttccaatgttttaacgcctggtgaagtaataattgttgtaagattatcggcaatctcttcatgagaataaccgtatcttttcatacctaaaacccaggtacactctattatcactattggtgttaaaaataatgtaatttcttgattaacagctctcttgaagatttcaaaagccttctttgattgttcttcatcgtcatttgtcaaaaatcttacaatgacattagtatcaactacgtattgcatgtactgcactctcccttattcggaggaaatcatttcttctttagcttcacgtctaatttcttcccaagacaaattcggctcaccagctttaggtggcatagcaccaaacaatgccaacaaagaattttttttaactacatttacaaaaacattgtctccttcaatcacaaattgaatctgatctcctgcttttgcatctatataatctctaatcttagctggtattgtgacttgtcctttctgagaaagagtagacgtaaattgacctgaagacgaaattaaccctctgttctcattttttatttgcatagtacacacatccttctttattttccgtaggtgttgcattttgttatttctcagtaatttaatccttaatactcctatactgtatagtgtattgtaaatgaacatataaatgttcaattcttgatatagtaattagcgtagtattaagtgtgcctctgcttacttattattatactactaccaaaaataaaagtaaagattttttaaaattctttaccaaaaataaaagtaaagaattcatccaggtctttacatcgagagtcaaacttcagattcatacccttgtatttacccatcaatgaaaagtttatccttatgggattcagccgagatacgtgtaaaaatgggtcatagcctggaattcgtttccataaaatgaccttttgctgtctttataggtatataatgaaattttcaacaagatctatataaaaaacaaacgattctttcaacaagctgtcgaggaagaatcgtttgtttttttatttcagcaacactctcacttcacgtctaaacgcttatagagaaacgtgtcgcgcctgaagactgcataatatcaggtagtttttctgaaataccattgctctctaccataataattgctagtacatatggaactagctctggtacaccttgcgctgcacattcctgctccaccatcgattgccacctcatgacttcaggtggtaaattctgcactgaagcattcccacttatgccaccattcggtgtacctgtagagctttctccacccaaaatcgccatactaacaattaaaagaatcgtaatggctgccgcaattattactcctgtagaaccacctaacaagcgaacgagccattttattcttttcactttcttatacttgtctattgctgtttcttgcgtcgctgccattttactgaccacctttaaagcgttctaattgtttctcgtcaggatcaaacatcacgttatatgtttcagtagaacttacctgtacaattgcttcccctcgtttcaactcaggtaagatacgaaactccgattctgttaaactctcacctagaacactttttaaagtctctaacacggagttatccatgttcaagaatattttgtattgagttaattcaaagatggctttcatcgtagacacatccactgtacttcctggtggtggtaacatttcttgtggggattgtgtcgcaaaaaatatacctgcaaagaattttcgcatctcacgttcgaactctaatacataacgattggcaaattcattttgcgaattgataatgttatgacactcatcaaggaaaaccatgaaatacttaacgtcttctattgataagtttttttcttctcgtaaatacttcatttgacgaccatttttaagcgcatgactccaaatcaatgttaatgcggtaaacaattgacagttaaaaactgatttatcgtattttgaaatcccatcaatatcaaagaaaacaatctgctcattttcaaagtttttaagtgttgtatgaccgttaaacatatcaccgtacaccgtaatcatgtcctccacctgcaatttgattgcttctaaatcacggagacgttgtggtgttgctcccgcttctagcttcagctcacttaaatatttataaaaatcttctaaaattggatagtgattaggagggaatcccgttactttgtacgggcgatcacttcccttttgaggtacaagtccccactcaatatagaaagcatacaaatgtttacgaaactcttgaatcaccgtatcatcaaattctgaatttaaaaatcgaaccatattcgtgactttagaaatatgttgaatgaatgaacctttctcatcaactgcacctgtatttgtaattttcgttgcgaatacttctaaggggtttatcattcctgtttctacttcttccgaatcttgaaccccacttaaatcaattattttaccgccttgctgctgcacaattgtgtaataatctcttgctttatcaaaaccacgaatgaagcaatctttcgcaaccaatccttcttcgatttgtttaagtagtgttgatttaccagcacccatcttaccaaagatgaaaccactaaatgatgttctagtacttgtagagaaaaacggatctaaaataaatgcgccacctgtagtagtttgtcctagataaattcctcttggatcttttaaatcttgatgatgaaatggaataccgaaaccaatattttgtgaaggtaatggatagccacttttcactcccaagtattctatttgatcgtcatagcttgcaaacaatgtttgccactcttctttttgtttaaaaacatacacttgcgctttatagttctgccccgcaatttctttcttaatatcaccaattcttttctccaattgttctagcactggatcatatatgaagatacgcaactttatgagtttaacaatttcaccttgctgcgtaatagaacgagcaaagtctgttaaattttgtagttcccaatgagcatcgtcacgatcagtagaacgacgttctgatgtcatacggtcttttaattcagtaatagaacggttaatgtcttttactacttcttctttattcgctgtcgctatgtctacacttgaaacggtatctttattgttcatgagtgccgttagccatagcggaggaatatcttcagctagatagtacacatgtaaacatgcaacatagcaatcaccttgcgctatgtacttctcattaaatttaatgccaccttgcggctgcaccctcgaaataaaatctaaatcatatccttcagtacgatattttcggtgttcttttttccccaactttaccattattcatttcctccttttacatttctgaattcatgttttgtagcttaaagattagcttctcaacttcttttgctttcatattctgcaagttaaattgacgtccaccatagcgcttcatgtccttcacattctttactaactctgtttcattttttgcatacacaacaatgaagaaagccaattcctttaaattcttttctacccacagtacccgatttaaattttcaattgctaaactatagcgttgagaccataagtgttcttcgtttctctctgacacatcttgactcattttcccttgataacgtagcgccatgcgcttccagtacacctgttgttctgttgtttctgtagagtacgttagagacaaaatcttgaatggctcatgatacacacgacataaactagttaactgattcataaatcgatttaaatcatctttgttcatagaaattaagtccgtagtctttacctttaaatacacctgcaagttgtctctacgatctactaagatcccctttttttgttccagtcgtttataaggtgcaacatcaacaattgatgcatccgtatttttaaaagaagcaaagatcgttgaaataaaactttgttttccattacttttctctgactcaacttgtctctttcggtttacttttttagattcaactgtcgcaactttcatcttcatctttcctttcatgagatataaaaaaggagagcgctatatctgcactctcctttcattcctatttcttttttgtttcgctgcttatggtatttacttcaattggatgatagtttttattgtccatcttcaacatatccaaaatcacaaatatatttctatttgtaggactgttatgaggtttaatacataagaacaccccaaacgccccaaacagcacataaaacattatccttccaagtcctccgactggaacaagcttcgacatataacttgctagtactaacattagaactatgattgctccatccatgatataaaagaaggctaacttaatttcttgctttgtattcttaggattacgcatcatttccattactcaacactccccttattacgttataaattttatttttcccccttattgttacaagacttatactctcttatcgtacttttaatatataggttcatagttttaaacattttactatcgttttccatacgttcctttataaaaagtggatacttttcaaacttagcataatattgtttaactggatgttcctcaggataatctttaatatcatattcataaacacgcaaaccataataattacgcaaacctttaggattcaaaatgtgcaagcataaaaatgacttataaattatctcctttgcttctacagaatcagttaattcattagctaaatatttttctgtataactcggaaatttgtctacacaaaaatcaaatatttcttcttcctgtgttgtaaatgctatcctttgttttcttttccaacgtataattgcgtaaatagtttctcttacaaagcaatatacccacattgctatttgtaaaatccatacccccacaattaatacaaataaaatcccaataatccatttcactaaagtatgatctaaagaccataaaaaccattgcttaataaagggcttgtcatatattagccaacttaataaggcaggttttactataatgcgcagtaaaggatcaagctcaagaaagatatgctctgaagcatctaattgcatatctctccaaaaccctccattataggcaataaaacatatcatatatactacaaatgaaagtgttgttgtaaagataatttgcattacaaattgattatttagtatttctattagaaactctttcattaaaattccccccaaaaaaatcttgatttacatactcagcgttcattactgtaaccaacttaggatcttttttcttctttcgccttagcactctaaaaatctgtttaaaaaaagttgcgatcatgcttaacacaatcgcaactcctaacatcaagatagcaaatatccagttattcatcttaaaatcccttttgctttctctctattttttgatgacttgtttttcgagtacagatggagagaaaaataagttagaaaggaaaaaataacaatgtaatgatataaatgatctaattcaaaacttatttgaaaaaccattatagcgacggcagcaaacaatcccgctattattattaagatactcgcctgtgattctcgctgtttcatctcaaagtaaattcttctttgattcgcaatatcaattactttcacagctaaccctcctaatctcattttctacgtaattgatctgtccgattatgtttacttcctctttgtcttaatcctgattttgttctttctactacattatcttgtacatttacatctcgctgtactgttgctgctcctgcccttgcagtatgctctaccgcttcatttcctcttagattttgtacatgcttaaacaagcgaaaatgtacatgtttatcttgacatttacaatagtataaggggaaagtctttatggtaatgcggaattcgatctttatgtaggattacatgatttaaaagttcttgatttatatttttcatgagtttagcgctccttttttgagaactttgtgtatgtagaagcttttttatggggtaaacaagtgaggattgtttattaaatatattcatggggatgagtaaatattatgagtgtttttgcagtcaacctgaataaggaagctattctaaaatgaaaatagaaaataaagataatgaaaatttataacaaacatacaatgataagaggatgaataatcaaaatgatccagtttatttgtgtatatttttaagtttgacgataggaaaaatttattactagagagatgatattatgaggaagaataattatttaatagtaggtggaaatagtttcattggtatcaacctcgcattgggtttattgaaacaggggcaaaatgtaaaagtattttccagacatataaataattttcctcaaaatattataagtgaagttgaatttattaaaggtgatttagaaaatgttgaggatatatataaggctttagtgaatatagatattattatttatttagctgcgacgtctaacgtagcaacttcaattgaagatgttttcggtgatattaatagcagtctattttttcttaatttcatggaaagtgttaaagattttcgtattaaaaaaattatattggcttcttcgggaggcacagtttatggtgaacctgaatatttgcctattgatgagaaacatccattaagaccactttccccgtatggaataacaaaagtttcgctggagaattatttgtatttttataagagaaaatatggaatagattatgttgtatgtagatattctaatccgtatggaaaataccaaaaccccttaaaaaaagtaggggccataaattgttttttgtaccagcatctcagtaatgaaaggattcatatatatgggaatccggaggagattattagagattatatttatatcgatgatttagttgaaattactatacaactagcacaattaaatcaattgaaatcttgcgtatacaacatagggagtggcaaaggtctttctttaaaacgaattatagtggaattagagaaaataacagaaagaaaagtggattttatctgttataaacaaaaacaagagaacgttcaaaaaatcattttaaatattgataagataaaacaagaattgaattgggaacctaaaatagattttaaacatgggattagattaaataagctatggattgaagagttcttatgtagtaaaaaataataacccacgctctacttgtatataagcagagcgtgggttattattttatttctttttctataacccaaaggtcttgatgttcccaccaaaatccttcagtatactttttgataattgggttatggggtaatgatttaattttgtcacacacgtaagagggactaactatcgtttgtccgtattgattcacatctaaatcgaattgttcactagaggagagaaaccaatagcccttttcatttaaatttggaaacccaaagtattttttgctttgatagccatgggttgtgaaaatgaataaaccaccaggtgaaacagcgttatacaatgtttgcagccaacgaaaccaagttgtatcaggcatatgagagaaaaaggatagacaaaaaacgatatcgtacgtagaggagtccaattttaactgttcaggctcaggatgagataatatagaagaagtatttaatttgttttcaataaaggaaatggcctcttcgtgtatatcgcaagtggttatactcaaattcgtttgtagatttaataaatgacgtgttacgcagccgtatccggatgcaaattctaacaattgaattggattggctgtaggaggataaagggaagtaattaagtttaagagtatttgtgctgagttttgcccatctttaaagtagtaatctatcgcttctttttttgatgggaagacgggattagtgacaatgaactgaaagatatgatcctcaggatggatgcttgcatttacattataactgtgtgcgatttgagaaattaaatctttatgttcctctataaagtctttcaaagagtattcctcccttgagtaatagtagcaacttacaagagatattgatggcatagaaagcacatgtttaaattttcaagtatgctttaagatactttctatatgtatacattttcattttagaaatgccgtcgatagtaaatctttctttaatgaaattttgcatttgcacaacttcattgtaatgggagtatgaatcttctgttctcgttacgctatttaaatgtcgtctatgatagtttaagggggctggattgaagtaaatatctccctctgtaagaagagaaacatagaagaaccagtcgccagctattttgaacttctctaactgtttttctgttttcttcatatctatatttttaaaaactacacttgaaacattaggtatagtatttttgataagtaacgtatcttgtatttcttcgaccccttttcgaaaatagggggctttccatttttctttatcgatatcatttgtgtaatttaaataatgattagccaatacatttccttgttcatctatttgttttgattgtgtgtaacttaaggtaatattgttatttatataaaacccctgtatcacctcttgtaaaaatgtcttatcgcataagtcatcggcctctgcgatccaaatataatcaccagttgctgcagagactccttttatccattgtttaaatacagaaccagagtttttatcattaataatctgttgaaccttcaggtgggtcttattttcttttgaaagcagctttttaaaagttgatacgctatgatcagtggaggcatcgtctaagaaaattagttcgtaaagagggtaggtttggtttaatattgattcgattcgatcaggtaagtatttttcataattatagttcggtatgattacacttatctttttgtaattatgttcgagaagatctagtaattgataaatgtaattaagaaaattgaagtttttttcgataagttcttggccaaagcttcccttttgtaatcgtaatccctcatcatgaataaattcatatattttttctagcattttgggtaaatttaaaaagtctactaaggcaccagttttttctgtaacaacatcttcaaaacctccagcatttttaaaccctataacaggaagttttgcatctaatgcttctaaaacaacatttggaaaaggatcttcccttgaagttaataagtataagtcagccccagcgttatataatccgatatcgggagtaggatcgactaatgtgaaatgtgctttatatttagggggcagtgtattcaggaattgaacgtctgttctccctacccaaatgaaatgaatatccttgtgagtctttcttactgagtaagagataagtgagaatagatctattccttttcgataatctgcgaagcctacacccaagatgattttgctatctagaggcaggttaagcttcttacgtaactcatttctagcttttgcaatattgttcttataaggattgtggttaaacaaaccttgagggagaatgtgacatttttgaggatccaattcagtgattgtacgaaatttttcatatacgtattgtgaagggaagacaactttgtaagcaaattcagcgatgtttttagctttcccttcagcagagtactgttgtattaaatgcggtaattcatgtattaatgaaacaacttttatattgtgtctagctagtaatgcgacgatatcgccacttatgacagtgctacatatggcgagggtaaaattctgtgataataaatcctttattaataattcgaccttttcttctgtttgataaccttgctcgagacaataaacaggaccgtacttttgaaaatcgggaattaaaataccggatccaatagaaataattgcaacagagtaatcaaagttttctttaagagctttaatagtatgtaaagaaagtagctgtgctccgtggaaatgggcatcatgggatacataaattatctttttattaacatgcatttcataacgcctcctaagtgtattagatttctttcctttttttaaaggtaaagaagagaagtgttttatttataatccccctagagatgagtaggagggagtacgtactaaaagaaaaaatactatccttaatatatatttaccgggtctcacattcattctttagaaaagtattagtattaagttagagagtgtaagctgcagattgttaatctgaatacataagtttaagaagttctaaggatgtgttagaaattaagagagggcaaagcttttatgatttataaaataaaaaatataaaaggtattgacgattgatctacaggggtgtaatatagaacaagtcgccgatgacattaacgtcgcaagcgacaaacgaaatgaaaaacttagttgacattaactaacgaagatgttaacataaggaagtcgcaaatgagcgaccaagtagttctttgaaaactgaacgaaacaaacaacgtgaaacgtcaatttttattttagatgctagacaaactaaaaaacaccccctatttatataaaaaactccccttgacttctcatagttggtctttcaactttctatacttattataacacgcattgctatgcgtatcaataggtgagggtaaatttctctgtttttttatatgtttttttatgaatatatcagtatatcgagcacccaaattgggtgctttttattatgtgaaaattacataggtggtgcttagtaaatgacacgacattatttaataggtacattagttaattggcgtgaaagtgtagaaagatttcactacaatgaatcattccaatttttaaaagaagaattccaattaagtgatgaagatacaataaaagcattttggttatctttctataaatggtacgaatacagacacccgaagttacgagagttattaggagaatggtaaggagtgagcaaagcgaatggctaaggaatatgcaaaacgcttttataaatcaacagcatggaagaaatgtaggggggcatatattgctgcaacattagatggaatgtgtgagcattgcaaagaagtacctggatatatcgttgaccatatagtggagattacaccagtaaatataaacaatccagacatcacattgaaccatgagaacttacaatacttatgcttacaatgtcataacactaagacatttagtaagtacagtccgatgagggaagatgtaatgtttaatgagaacggtgaattaattaggagggattagagatgcagtgtaatggtaaggtgttaaataaagaacaagtagacaagttacagttcatgattaataactattctaataagggaatggatatttgtacatgtgatgtagagcgggtactaaacaaacaatatatgaaactaacaaagctagagaaagctattgctcttagcatagtctttaatgctattgataccaaggaactagatggacatgtaagtaaagaaaaattatcggatgtacttaaaataattgaagcgttaaaagaagagatagatgcagataaagagttagaagaagaaaaagaagcgcatctaaatataattaataaactaattgatagtttattagcagaaaagaatcaggaacaaaaagaaccaagccccccctttcaaaaataaagcaaagccccttagggggaccgagaggggagcttcacgtaacacacaggtcattgctatagggggtgtggtcatgggaggagtgaaattttatgagcgataatttagatatagaaaaagaaaaacgaattaagagagagatgacacgattaaacagtttattaaagaatttagagccgaagaaaaagagagctgtttcttcactcataaaaaacgctgcttttatggctgtcactttagaagatctgcaagaagaaattaatcagaatggtgttacggaacaataccaaaacggagcaaatcaatttggagttaaaaaatcttcagctgttgaagtatacaatacaatgataaaaaaccatgtacaggtaatgaaacaactaactgacttgcttccgaaagaacagcctaaagaagaggatgatgggtttgaagactttgtgaataaaaaatgagtaaacgaataagaaaacagtatccattaacttataatccaattattgagtattacaatctcattgaagcaggggaagtaactgtatctagtaaagttaggcggatatataagaaactcgttaatgatatatacgatacctcttctgtatttgagtacgatgcgaataaagccaatcatgtaatagaattcattgagaatttttgcaaacactcaaaaggtaaatggggcggtaagccaattgaattggagatttggcaaaaagcatttttagcagcttcttttggatttgttcataaaattgatgggacgagaaagtatagagaagtactcttaattgtggctcgtaaaaatggaaagtcaacaatcgcttctggaatagggttgtatttgcaagttgccgatggtgaaccaggtgcagaaatatatgcagttgctactaaattagaccaagcgaaattagtttggctagatgctaaaaggatggttaagaaatcccccgtattattaaaacgaattaaaccgcttgttcgtgaattaaatgcagattttaatgatagtacgtttaaacctttgggaagtgattcagaaacacttgatggtcttaatgttcatggagcgatgatggatgaaatacatgcttggaaggataagaatctatatgacgttatagtggatggtacttcttcaagggaacaaccaatgatatttatgattacaacagctggaaccattcgtgaatcagtttacgatatgaaatatgaagaagccgaaatgcttttaaatggtttggacgatccagacggctataaagacgatcgctttttaccaatcatatatgagttggataaaagagaggaatggactgataatactaaatggaaaaaagctaatcctggtttaggtacgataaaaaagatagaccaacttgaaacaaaggtaaacaaagcgaaagcaaattctttgctagttaagaacttactaacaaaagattttaatatccgcgaaacaagtacagaagcctggttaacatttgaacaattaaataacaaggctacctttgatgtagcaaaattaaagccttcttatgggattggcggttgtgatttatcttcaacaactgatttaaccgcagcgaaggttatttttatgcttccaaacgatccgcatgtctatgtattacaaatgtattggcttcctgaagatttgcttgagcaaagaagtaaagaagataagattccatataatttatgggcagaacaaggaatattgagaacaacaccaggtaattcagttcattataaatttgtaacacaatggttcttagaagtcagggatgaattaggtatttatattccgtggatcggttatgatagatggtccgcaaaatattgggtggaggaaatggaaggctactttggtaaagaagcaatgattccagttgcccaagggaaacaaactctttctagccctatgaaattattaggagcagatttagagtctaatttagtaaattacaacaataatagcattgataaatggtgcttatcgaatacagccattgatgtggataaaaacctgaacatacagccgaacaaaacaaataatcagcgtagaagaattgacggaaccgcagcgcttttaaatgcatatgttgtgcttcaagaaaaacgtaatgattacttaaatatgatttgagggaggtgaggaattggggttattcaacaaaatattcggtagaaaacaaccgcctactacgacccgttttgaaatgataaacgataatggagggggctttttctcgtggaatgggaatatctatcaaagtgatattatcagagcctgtatacgtcctaaagccaaggctgttggtaaattaatagcaaagcatatacgagataatgcaaatgaatttaaagtaaatccagagccgtatattagattcattttagaagaaccgaatccattaatgacaggtcaaatattccaagaaaaaatgactgtacagctagagctgaaccataacgcctttgcatatatcaaacgggacgaattaggagttccaattgaaatttatcctttgccatgtgtaacagtagaagttgtagagggagctcaaggtgatatttttcttactttttattttaaaaatgggaagagaatgaccgttccatatgtcgatgttatccaccttagaaaagattttaacgaagatgatttctttggtgaacatccaggtaaagctttatcttccttaatggatattgttacaactaccgatcaaggaattgtgaaagcaattaaaaatagtgcagtggtgaaatggatattaaaattcaaatcggttttaaaacaagaggacattgatgcacaagttcaaaatttcaagaaaaattatttgagtattgataatgaaaacggtggagcagcttcatctgatccgcgctatgatttagaacaagttaaaccagaagcatttgttccagattcaaaacaaatgcaagaaacaacacagagaatttataacttctttaatacaaacgaaaaaatcattcaaagtaaatacaatgaggatgaatggaatgcttactatgaatctgaaattgaaccgttagcaatgcaactttctggggaatttaccaggaagtttttttcacgtagggaacgtggctttgggaacaaaattattttcgaagcagcaagccttcaatatgcttctatgcagactaaaatgaatttagttcaaatggttgatagaggagcaatgacaccgaatgaatggcgttctattctctctgtaggtccaattgaaggtggcgacaagccgattcgaagactagatacagcgttagttaaagacggaaatacaactgttaaagaccaactatgagaagtcaaggggagttttttatataaatagggggtgttttgtagcacactacagtttactgcgtaaacacgtgtgcccttcgggacatttcggctaccgccgagccataacaagcatggcaaaaaaaatcatgggctttgcccaaacccacaagggaaactcttccccttgacccctttcaatcgaactccccaacccctcaatccttgagggactccctcgccggttggcatccccaaaacggctaacgttttggagttccaagagggttctgggcacagtgggttcgtccactccttaatgctcacttcgttccgcttaccgttggacaaacatcatacaactacctctaactttttacagttgacatccatgtattaaaaagtctctttttatattcaccacgactacataacatgtcccgctgccatgcaatacatcctcgccaatcttccctatttttttcagctactaaccaacttttcttaaaaactattaaccccaacaatgacaaagccattcccgcgtcctcgtaaaatgtcctcgccaaccttcaacatttttcaactcgccaccgatctatgggaattttcttgtagtgaaatgactacttcctctacaaacataattttttttgttttacaggaagagcttcaactattctctatttttcaaacatcatcaaatctattgatacaatcatattctttatgagaaccactgtcggaacagccacagaataaaacgacaactattcctagagcaattccaatatcgaatccatagaaaaatacacctcagaacgctcagaatccattctaggaacttctagttcccttaagaaacccaacatcctaaaatacttaaaaacgattataagacccttaaaaagcaaaaataaaaaaagagcataaggaaaccgaatcccactttgcaaaaaaagtggtgaaataggctgtgcctattgggtttctatcactctatttttagggatgtatttctaccgtttgtatgcgacctatatgcgtttttcggcactttgtatgtgtcccgtatgcgcctatatgcgcttggtatgcgcttaaaattaaacctaaaaaaactgggatgcgttttttcgggttgtagttcgttttgagaccgtttaaagatggtttgtgggtcgtcttgaggcttttgtagatcgttttgatgcccttttaatagttacagcaaatataacaagaaaaaagtccattcttttgaaaagaatggactttttttgaaacgaggaaaaattaacttgtaaaccattttacctgtacataaccagtataatacaaaataagaataagggttagaattttctgttatttagactaacattatgtgttaaatattttttttagtaattaaataagctatgatagctgctactaacgctaatgctacaataattaaattttggattatatatcctgtaaatgagtaatcacttttaacaatccattgataaatatttagagatagaaaaagtgttaccggaaataaaataaaatacatttgttttaaaattgaacttttatccataaattgcacacttacctccataataagctaaagtagccgctaaacctgctacgctacttcctataaagaatttaacgcctattttagccgcttctttccataattttttctcaagataatatgccaatccaccattaaatgcggcttgtacagcatttactccaaaaaagtcatataaagcatctttcatgcaacttgtaaaagataaaccagcaatatcacttttatcttttttaatttgttgtttaagtgcatctaaaccaacatcattcccatatttcgcttctattttattaaaatcaaaatcaacaatttcaccttgattattatatatagcggcttcttcatgcataaattgaaacgcttctgctaattcattaatgctcttttcatcttgaccagaaacgagagactgtttcgtttgtattatattgttgttatttgtagttgccgcaaaaacattatttgtcacaaatgctacatttcctgccaatattcctccgactaacaatactggaatcatttttttatatgtttttctccaattacttctctcaatactaatttttttcataaatttcatccccttaagtttattattcaaaatagataataaacttaatttacatataattcaatattttgttaataatcctaatatttaggtcgattgctaattgttggaatttgcttttaaatatcttttccatgtgcatattgttgaataatatcatttttttctttagcatcatgtgtttgaatggaattattgaattgggaaaagaaaatacctgttgtacatgctacccctattagtatcagactaaattttttcatcatttcaatgactccctttctaataagtttcttttagctttgtaacttttataaaaatattcattagatttatccttattcttttcttcataaaatcttatagccaattcttcagtataatcttgtatgtatttccatagattttgtttttcaaaatatggaatcgcgtctaacatgactttttctaattgttcagtagataatttattgtttaatgcttgtaaaaataagaaatgaattttatattcttggttacaaacatttagccctttttcaatatatgtgtttactgtatttgtttgttttaacttgtaatattcttgtgctaataaaaacattgttttgtaatcgtcttcttgattttcaaaggattcaagaagataacggattgcaagttcagaaagattttgatctgcatataaaagacctaagttataacgtacgattaaagctaatttgttttcactgtgtttttcaaatttattaattgcggaaagcaagtattcttctgcaacagaaaattcccttaatgtaatacaagccataccaagtgtgttttcacatgctccggttttaatctcgtatcctagtttcccactaaaaaaacttttggctttgttagcatattgagttgctaataaggcttgatgagtatgataatagaaagttgcaacagcataattaaattcagctttttctacttcatcaggaatttcttctagtaatttttctgctatatcataatatttttgagtttcactataatttcctgttttcattgcatgcatgcctttaaagaaatgataatagtaatctaaaaaattatttgtgtgttcttttaattgttcgattttttctaaagattgttctctatctgcatagtcgtttgtaagaatcttgtatctcaaatcaataagtgaataatataaaagtaaattttggtcttcttctatgttgttaatttctttttcaatcttttgttttaattgttttgctttaataatgtgttgcgctcgaatttcttgataccaatcatttaataattttgtaatttgttcgtttcctagttgaacattcatagaatcttctccttttccaaaattatctatattttattttctatcatgttatcatgctattgtataagactaacttttcaacagttgatatataaagtttttaatattctgtatttttaaatagtgtagcaccttcactatttaaaaatacttagtaacaaataaaaaaagagcccccaaacaggaactctttttcaatactcatcaattccatcactttactgcactactatcaatgaaatcacgaagtatgccagtaccgctcatcttccaaggtgttgacgcacctagcaagactataatttcatttaccacattcaaaccatattcatacaataacaaatagaaatcaaaactttaaatacacatatagccctacaaaaaaaacatatgtgaatataactcattgtcgattagcaaaaatatgctttcatcatacacaagctatctaaagctaaaatagcccctaaattattttgtctcactatcatctcgaatatattcaattaaatccaataactcaacatccaacttctcacagatcgttatcaatgtatctaattttaaagaagacacattctcattgtgccacaacttattaatagaattacgacttactcccgttattctcaccaaatccgaaatattatctatattctttttcgccataatcatacgaatattacttactaccttcatttttcatactccttttcattcaatgtacataccattttacttacaaggatacttttatacaaataaaacataaattaaataatattaaggttattttttatatattcacatttaatattaaccttaaaaataaaatatattgttttattatttaattttatttgttttaattgaaattttaaccccttagagttaaaattaaatatataacttaaaatttaatcttttaaaatgtatttttaactctaaaaaaactaagaggagattatcattttggcattcctaacaaattacaaagcaaacggaaaaagatacttttatgtagaaaaatatgttgtagagaattattttctctaacttttcttcgctagtatttgaaattaaaaagatggtggagttaccccaaatataacagtgactttgtttaaagaagtgttttcccatttatgctttgtataaggtgggattttaacactatcacctgtattgagaagtaaaacctcatcatttagatatagttttacttgtccctccataataaatgctatttcttcccctttatgtgccacaggctccatagatgaagcagtttcagggaacagattcattaaagccaattctagtgctccatctaaattaggagataataactcatatgaaacattgccgctttcaggaaaagttatttttttcctttggttagctcttacaactaattcttctgtattggtatcctctaagaaaaagttaaacaatggaatatttagtgctacagaaattaattttagtgtttgtaatgaaggatttgtgattcctttttcaatctgacttaacatggaaggtgttatatcagctaactctgctaaacgtttactggttaatccggccccttttctaaatgccctaattttgtgaccaacattaatatcgttcatatatgtaatcccctttaaataagcaaataaaattaaattattattaattttatttacttatacttaatatattgttaatatatacttaattataataaattattattaattttaaaacatcatatgtacatatggcagcagctgcgaaaaaatgggaaaaagatttaattagaaacaaaggggttactatttttaaatatacagcgggctataataaagcagtagaagaaggaagaatacaagttaataagaatcaaatgtgctatttgattgacgatgaaaaatcaaagcatttattttaaggttatgcagtagctgatactcgtctgaataattgatatacaaataaaagttggtgaatggcatcctctatttgtatatctaccatgtggaataggatttggtggagtttcattcagtttaaaaattatggtatgtgatcatgtacatgtaatttttgctgggcctacccattctccgtatatgctattaggtatgatgaccggattatatgatgggatttccataaaagatttttaatgaaaaggaatctaataagtaaaggacaacttaagagtagacttcaatgctgtattgtaaaatttttaaggaagtgaaaatagtatgaaatcagctttaaatagtattatgatctcttcgattcttgcagtaggagggatcattgcgcttttgtttaatttaatgggggatcaagattggatctggaattgggtagggctattactggcatatctatctttgggcattttaatcggtttatataataaaactgtggatcacaaaacatttcctaaaatactaaaaagaactttgtttatttcctttaatgctactatattagggataataataggggtaacataccaactattaggaaagtggaatcttactataatgatgtattattggttgataattttattactacatttaattactataataacattagtcatcctagtatttgaaaaccataatagtaaaaattatagcttactatatagttttattataattttaaacattgtccttaccttaggaccagtattatttccagtagttctgactattataggaaatgccatgaacgctagtgcagggcactaattttcacctatacagattattattaagatagaaagaagattataatatgaaaattaagcttaagaaaaagagaattataagtgtattgttggctattactttagtagcaatagggtattacgtgtttcaatctattacgaatcctaagctggtaaatgcggaagaggcaaatagtgttcagcaagtgagcagtctacctaaaaatgaattaaaaaaattgatacctaatcgttttgatggtaaagaaagaaaagttgcatatttaacttttgatgatggacctggaaaatatacagctaatctattagatgtactaaagaaaaatgatgtgaaagcaacattctttttaattggcgataatgtgaaaaggttcccagatttagtgaaacgagagcatgtagaaaacaattatgtgggcatgcatagtatgacacatgtttttaaaaagctatacaccaatcaggaatatgtgaaggaaatgaaagaagatcaatctttaattagaaacgttattggatacacaccgaaattaacacgtccaccatatggatcaatgcctggcttaaatgaatcacttcgaaatgaagtggtaggaaataatttgaaagtatgggattggacaattgattctttagattggaaatacaataaattacccgttgatgtagcagctgcaaagattgttcaaaatgtcttagcaggtgcgacgtcttcaaaggaaattgttttaatgcacgatattcatccacaatctgtcgcggcagttccagtaattataaaagggttaaaagaaaaagggtacgaatttgaagcttatgatgagaacaatcattttccaataaacttttggcatgataatcgtatataaagagatatattagttaaaagaaaatcagaatggaataagcaattcatatagggtttaaatatttgtaagagcgtgtttagatagatgaaaacacgctctttttactgaactattttattgtagatttaagtataggctttctaattttagaaaaatttatatgattttttcattcatttctacataagcgttggatatttcgtatgtttggccagaatgaaaagagtttattaaaccattcattattcacgttcttcttcatatatttgtaccacaattatttttttgttgttaaaactagtttttaagaagcatatgctttagcaactgcagaaattctgtatcacttttatcatcttttatataatcctgttcgtagttaaaaatcattcgtactaacataaaagctgtaagcggtaatgggaccttatgcaaagctccttgctgataacctttttcgagcaaattacttatcatgttaattgcttcttcttcagattgtttaaaacaagttgtaatttcaggtgaatggtactctttatattcttgaaagagtgtagaaacaaacggatcttgatgatattctaggctgatataatgaagaattttttgtattcgaagtaaaacatctttttcttctttatataaattaaataattgtgagcgtttaagctgaatatgacgcatatagcagtcgcataatatttcagttttatctgtatagtaataataaatagtacctttaccaactttagctgtctttgcaatttcatcaaccgtcgtgttacggacaccacgcgtagagaacagtattgtggcagattgaatgattttcatttttttattttctttttctaatttgatcattgtctacaccctatccttgaaatatttagcgaagttttctatctttacattctgtattagttcatttgtaattttgtaactcctaatagaaagtcctctatttgcttcttatagaataacatacaccattcttatttctagtatataactataatagaatgcaactgtatcacttaagataaaaatgaaagtttaaggtaataattttttaatcggacgatgatttctttcttgattgaattatttgattttttattcaattcattttattatataaacatgactaaaagatgtttttagtcggattttttacggaaaaccgactgatattcgattttagtcggtttctatactatttgagagaaggtagacactatgtgtggaattgcagggtggatagactggtctaaagacctgtctcatgaacaagaaacgttaaaaaaaatgacagatgctatcattcaccgaggacctgacgcagaggggcattggttttcaaaacgagcggcattaggtcatcgacgtctcatcgtcattgatcctgaaggtggccttcaacctatgctctataaagatggaaatgatatgattggccttacgttcaatggagaaatttataactatcaagaattacgtaaagaacttgaggagaaaggtcataaatttcagaccaagtcggatacagaggtattactacatgcttacttagaatggcaagaagattgtgttcaacatctaaatgggatttttgcttttggtatttgggatgaaagatttgggaaattgatgctcctttgataactttaaacgtttatattttttagttgacatattaccgcaggtctatcgttatatataataacagtctactacaatttaaagataatctaaaatttcacttaccgtattaagtagatttctccatatcgctccaaaacactacataacgatgtagggcttcaatgctttttaaaccaagatgtaacttgatctctaccggcgtcattcctttttgtaaggcatttagtatccaacgattccgtaacgttgtaggagtaacgtggatacttgcacgtttaatttctttttgaagcatcctttgtacaccaattttcgttaatgctccaggagcatctttctcataattccaacgaaatgtttgtggtccgaaatcaaaagctacaaataatggatcgttactatgttgttttggccgtatcgtttcaggaatgtcatttaaatagtctaggactaattctctatcttttttagatagctttacggtgcgtttaaacgcacttgtttgtcctggggtaataataccttcactaagttttaaatcgttcatggatagcgaaataatgtcctgaatagataaaccatactttagcatgaaacggactaacaggatatttcggttcaagatatgtattcttccggatgcctggtattctgataatccatctaaactttttatagtgcgcataagtttacgtatttccctatctgaagcgaaattttttgatgtaaggggtggaggggcaacatcactttttaaatcgcttgtattaccatgaaactgtaaaaagttaattacaactcctttaatcctttttatgttagatatagacgctccacgatctcttttaagagcatttaagaaactaaacaatgtatttgtatcgaaagattgaaagacttcttgagaaggggatgggtgtctttttttgatccaggagacaaaaatagatagatcgtattggtatctttggagagtagattctttgcgcccgcgactcttaagtgaagacaaaaacatgctgacacttgtttcgtatttcatttctatatacctctcttttctaaaaatcgtgtaccgcaattatacgccgaaaatcttacataatgcaatagggggttcttgtctcttttatgttctccttcttcttttcttgtttttttcgtcgcgaaacatcatctaaaagaatgaggggatgtgttttctttactcctgatcataggttattttagttccattacgtggttagttctgaaaattcaatttatttttaatacgaatgtttcataagtacatttaaccctttattcgcattaatatcgaagtggatcagtgatgaaaacatcaatttctcaaataataccttcgatatttcaaacagaatacactaaggaataagtttagaatatatttaagaattacttatggaattactatagaaatgaatagaatagctataggaataggcgtaagaatacttgtaaattagttctgtgcctattcctatagctattctatactaaaatcctattatatcaaggtagattctaattcttataaagatcaagattactgaagttatccttgagatagtaactgtattctacgaatactgtaactaatcgaaaggctattagtcttttaactacagtaaatccgcggcggccggcagcccattcattccatattccatcatccaaatccaactcaacatctttcgtatttcggtacgaaacaccatccatcgttcctggcatataatatatatcacatagcttgtacatatatattatctctgtatatatcctacctatataactgatctctagatcacactataatattatgtcagctgtcctcactattaccctctcataaaaaaatgctagttgccctttacggacaactagcattttcacttcaatatccctgtactttttttgttcataatcttgtacatatatctcgtatggatcatgaccaattacatttctgtttaatagttttgatgcacatattcaaacaatattatcgcgatttacagcaccaaatatattcggtgctgatgtttcttgtttcacttcttcttttgtttcttctttaattgattcctctttttttacagattcaccttttgagggttcaatattttgaacagaaggttgttcagtgatcactttagaaacaactgtattatcttgtaataaatttttcattttgttgaactcttgataaaattcatctttcatcaacaaatctctatgcatttcttgctgtgcttcaaagctttttacgtctaacgttccatattgttttataaaaaactttattaaagtaaataacgattcacctatattatcttgattttcgtaccaatcccaaaattccggatcatttactttttttagtttccatccatattgttctggttttgtttttgccttcataatttaacaccaacctaaactaacacttctttttctagtacatctaagccttcaatattcatgtcaacagcatattcagccggaatccatagtaattctaatttatttcttttacagaacgatactaactctttttccaaatcttcttctagtgcaattgatcctcctccataaattgcaatgacttcggcttcactggctgtattatttctatatttattacgaatatcgcgcaaaatattctcagcttgaacataacgagtctcatagaaaaactctttagcttcttgatggaatttgtgttcctcatgtaataaaatctcagcaaattgttgacgggtaatttctccaacccctggtctgttattctgtaaaagttttatcgcttctaacaaagcatgtccgatacctcgacgttcacctgtgcatgaatcaggtttaggatttaatccttctgtataaatgtactctgttgtaccatcaccaatatcaacatgcaggattttctttgctgaaaacacttcgagttttaacattttttggatttcttcttcggtatattttagttcttgtttacaaaattccacgtattttctaaacatcttattctcaccatcagcaatcgcgcgaatcattcgatacaatggaggaatcccctcacgagtaacagttacttgttcaaaactaactgttacagtcaccttctcttcagcaacatctacaattgcaatgtgtggcttttctactaatcgtttttctaatactctagcgtgttctggtttccattcacttgctggtatagctgtagttagctttacttttacatcaagtgttgctggtaaggtgttagtttctccaaattccttttggattgcctttgcagctacaatactaactaaatgaataatcggtagatcatcttcatgttttccaccttcttcaatatccattgttgttgtatccttagcaaaattcatcgcacgtttgccaactaaaaattgaccactacgctttattgtattgcttgtaatatgtacctgtaattcatctagtaaattcacaacacatttttcaatatttgtttcacttggatcaagaggtttaaacaaacgtttgtatacactaggtactttttcaatcttatcttcaattttgaacttaactttactatttccaatatccgcttttaagttaaacatcatactcataaaacacatctccttttgtttactattccattactatatgaatattttccaaaaccttattggttataaaaagattactttttgataccttattgtaattgtaacacgatcctttgggtgatgcaacaaaaaatgcaataaaatcaccaaaagattaccaggggattactttttgatacctttattgtgactaataagtgttttatttgttatttttccgtaacctttcggcgagagggtgttttcgcattatgttttaggtatctttctggttatgatttgtatgtcagttgtaaagtgggcagattatatgaaaatccgtgggatatggacgatcgttgttacaacaaattgaaacatttgggtgtgacagtgtctaataaactttgttataaacttctagatttggttgtaacagttttttgtacttttataaggaagaatcactgattttgttgaaaatcgaaaacagactatttagcgaagtttagggaggatgtgtaggtttgatatttatatgcactaatattgggtataaatgctaacttaaatatgtacattaacgcttgaataaatatgtacattttcgaaaatgtacatatttattcaagcgttaatgtacatatttaagttagcatttatagataaattatatgttatgataaaaagcaataaagtacatcatcctgactttattgtgtatgtttagcctatgtatgtcgtttgtattaaaaaataagaagtctcttaaaatgagacttcttatttttgtatcgagggggtattacagatgattaattactatcaaatatttttaattaccatggcaggtattgccttgtttttttatatacaacaagctggaaaaccaacgaaaagaaacaaatggaagtttttaattgtagtatttttattttactttttgaattatttattacttaaattttcatagataaatatagaggatttataaatatcgaatatattaaagaattataagttagcaaaagcaattagtaaagtatcatggtcacagttttgagccatgttagaatacaaagcaaaatggtatggaaaacaagtcattgtcgtatctaaaacattttcttccagacaattatgttcttgttgtgggtctcaaaataaagacgttaaaaatctcaacctacgtaaatgtgtttgcccttcatgtcaaacacatcatgataaggatattaacgcaagtatcaatctaaagaatgaagcgatcaagctgctaaccataaggactgcggagatagtctaatcaattagagttcgatagaactctttacttgaagcctgtagatgtagatgcttacgggatatatatgaaggaaaacgccaccttactgcaagtcctgtatattgacgataaggtcatgtggacacaactaaaaggatatgagatggataaacatgaacattaactgtcagatggtgatacttaagacgattagtaagctatagtttgtaacaagaagacatttaatgagtatttattttcaacaaaatacgggttttgtatggaatttcctgcaatgaattcaccatggataaggttgtctcatatcatgtaaagattgctttattaagattataaaagggtgtgaatgcattggaagatgtttatgtgaaaattgacagtttaaaagcagaacaaaaagaaattatgcgagatattcgtaatttagaaactcgtacaacaattaatgagaaagacatagctacaattaataagcaattagaaaagattagcataaatacaacttggattttacgaattattattagtgcaatcactatgtcggttttggggttaatattaaagggtatgatttaaaaataacagtacttattgagagatggacgagtatctctctttatttttatcattttagccaagatagtttttaaaacatgttataggtaattagtacaattaaatggaagacattaataattgtttagcaatggtaaagtagacgtatataatttaaaagagaacctatgcagcaatacaaataataatttgtatgtgaacgtaaaaaataccaagaccgtcctagaaaggagggggcttgatattttttagttaaaattacgattttttaagtgaatttcatattctgttaaccatactaatatcaagcactttaattcaatcgtttcaatttcgcaagtgttttcttcatctcccacatatcggtgggtggtctttgtataatcgaatcttatctctaaatcgcaattgttaccccattactatcaagttaaagttttataatgcccttaaaatgaaaaacacattattctactataacaatacaattttgtatgcaatattgcatatttatacgttatgcctctattagacattttttaatggtaccatagcaaggtgagagtctataagggttctccttaataggaggaaatatggaaagagtgcaaaaagtttacagtaatccaaaacttaaaagttggattaaacaggtattagctgtaggaggaataatagggtgctgctatttggtgttatatgttttctgtttcttagttatcatgtaaatattatacaattaaactagtagagtcttgcctagagaggtaaggctcttttattgtatctggagatgagcaaacaatataaaatacatcttaggtttgtcagattactttgtacggtgccttgtttctctatgttctagaccactaactcctatcatcgagagttaataaacttctatttaaagtttccatttatattgaaaacagaattctattgataaaaaatgtgtttttactagatatatattaaaaagataagcataagttatattacgttgtgatagaatctttttatctttgaaaaggatttaaattttaataatagatttgagtcctttttgtatattataatccctatgtttgtatataattataatatattgaaaatgatttaaaagcaagaatattagtaggggtaccgctacattgccatcaacttaagaaattaaatgttcctcaaaacgaaaatagtagccgtcggctactattttcgcttttatttaagctagcgtaatgtctctgaaattttgaatgaacgtggtgtgtcagttcatccaaaaactattatgtgctgggttcatgaatatggcatctgattcagcaaatttggtaatcacccaggtgggcaagctgagtatttaaaagttccatttggaaactttactctatttgttataccgtaattttgtgaactggaggatgagtccctcttttttatccgatgttttacagaacccctattggagtgtcataaatgcaaatgtaaagtcaggggatactgttatcgtgcttaattgtggacctgttggattgatgccacaaaaatttgcttggatgaaaaatgctaagcgtgtaattgctgttgattacttagattatcgaatcacttatgcaaaaaaagattagcaatgctggagtatttgagtttagaaattatcccaatatgggggaacggatgtgggcatggatggaaagaaatcacctttggagttttttgaacaaaaattaatgagttttaaagaaacaaatttttgctccttgggggtattaaaacctcttaagttgatggtgacgtggtgctactcctgtaaagatagtaggaggactacaattaaaaagataggcaattctctgtatagaggaattgcctaatgaaacggattaaaagaaataacagacgaaccaattatattaaaaactataatatatgcatatatttataaaaatattttattattaagaatacattaacatgtttttagtatatctgtgttttctactgattctgcactgaaaattatagtaatagcatttaataattaagcttaaggaaaataaaaaatttatttaataattgcctgtgacaaaaatctaaactattaagagtagataggttaagtattcactgcattaaattcaagaaacttaaactaccaaaagggaatttcactattaaatctaccatatacataagtcaattataagatcacggaaacttgattatatgtaaatattattcaattttgtaaaagacattcattgacacttatgtatataagtaactatactcgttacatcgaattgaatgcgtgataatacaattttattattattacaaacatgtaaatataaaaatagaaaatttcaatttgataaatacaatggtagaggtgtttattttaatgaagcacaaattaattgcaacaggtatccttgcaggagctatattatcctattcttctaatattttagcggatactcataaatttcctgatgttcctacatgggctgataaatccgttaactatttagttgataaacaggtattaaatggttatccagatggaacttttggttcaaatgactccttagacagagcttcggctacaaagattatgacaaaagttttaggaatacaaattgatcctactgcaaaaccatcttttacagattcacaaaatcactgggctactccttatattgctgctgctgaaaaagctgggattgttaaaggtgaaggtaatggaatcttcaatccatccggaaaagtaactcgcgctgctatggctacgatgctagtaaatgcatataaactacaaagcacaccaaatcataatgatcaggttagatttgaagatttaaaagggcattggggagaaaaatatgccaatattttaatagatttaaaaatctctaatggtaccgagaacggttggcaaccaaatagatttataacacgtgctgaaggggtgtttttgcccatccccccgaaaagggggaataaggacaacaatactttattcttccaaggagtcttctcgtgttaagctggtgagaatatcatctttattgatactctcaagaatttcctctatatttactactgttggggatttactaaattcataacgaccataaaaattaatatgttgccatgcaattggtgaaatatactgtaacattttcatctcaaaccctgtatctttggattttattaataaattcgataatatactcgcattgtaataaacaacacagttgctgagcagcctactacattcattccagatgtgctgatcttgttcagtcttgaaacgaagtttcccaaagtttgcataggatactgatcgacgtaatttatgatagctttctccacgatttagtgatttttgaacattttgacgtaacgataatgaatcaatatattctaaaaaatataggcttttaatgatgttatcatactcccatagtgcccgcttggtttgatttttccgtgcataagaacttaattttcgaacaataacattttgagtcgtcgtctttaaagcaagagataccataattcgttttatattgtcccattcttttacaatgagatctgtattaattttacgcacaggtttaatcagcaattcttcataatggcttggatgttgaaaaccatataaatttcgagatatcgttgcttgaatatctttatatctaggtgcaaattggtaaccaaacaaatctaaaatagcaaaattaacttcattcgttccatgtgtatctgtagaatggatagtaggttttatattggttgtattattgtataaaatatcaaatacataatggctttcatgctcatttgcaccaataattcttgcttgaattggaatgtggttagccaccattgtatacgaagtgattcctttattcattccaaaatatttagaagaatgacgagactgtagtgtatgaatctgtgtttcgtatttttggccatcactacttgaatggatgaaatcatcaatgttaaaatacgggaaaataggaagcttacttgtggcattactgatacaatcatttacatcttttaatgtttctaatcgaataaaattagctgatgtagtagctaattttgaaaaatctatatcagagacttctcccattctatataaccccatatttgttccccaagctattaaacatggaatgagagtataatcctttgctttttgattggcatagcgtcccagaatatgttcaaagttatctagaaaattgcattgctgatttacaaaatacaggatactcctcatatcaacttgtggtaatacatcgaaaaaagaatgattaataagagatgaagatcgagtatatggaagtgtccaagaatgatgatttttatgttttttcacttgaacatatttgttttttccagaagtaatccttttattaatagagatgatacgagcttccaatttgttttcaagttcttttaaatgttgttcgatgggctgttgtagcttagttaaattgaaatcttgaatcatactctctttatgtacccacgtatcttcatcgactaaatcatcttcaaaacttctatactgtatgctatctctacaaaaaacatctcctgattgtaagcggtaccataaagaatgataaattaaaaattcatatcgatctattagtaaacgttttgaatgcgcatcatctttcgtgtaaaggtaacgtttggccccattttgtataaaggtttgtggaatattttcgatatcatatttaagtaaagcttttcgtttcataaaaacttcttttaaaaaatgtattgcatccataagaggatcttcaatatctgttgtaacaaaatcaatcgtcataaaaataggacgaatttgtctcttgaattgtaaagctaatgtatcaatacgttcccaacggaacgctttttcatctatcttcgaagtattcaggatttgatttgctagctcagttaatttaggacggtctaggatagaaaatacacgtctttgtatgtctttaaatactgtatgttcggaaatgttttcatctattataacttgtaaaatatttccgactttcttgaaatcttcctggttttctgtgtaatagttatatacttgatcttttgcaaaggataaaatatcatcgttgtattttctcattttataaataaaactattgatcaaattatcattcattctttggtatcgatgaaaaataaagcacaataaataaagatttacaagggattcattaaacctttttaatttatatacggaataatattctactaaagaagcgtaatatttaatactttcattagaaatttttagttgtggcaaaattgaattggccagttgaaaaagaggatacatttctttcccatattcaatttcccgtttaatttcattcatactaaagtctttaggttcatgtttgattcgagtaatcttatataaaccagaaggattatataataattcttttaaatgctgtttatccgcctcggatagctgtttttgtataacccttataaggcggttttgttcatatgtaatagcatttcctataacctcttgtataaagctataaccaggaataataattcgtttagtagttaaataatttataagttcgcgaaaaataaaaatcggtttcccacttatagctgcagctctacgagcttgttcttttaaatctagtcgagattgtgaatcacaaagataataattaaagcgcttaagaataagttgttgttgatttagcctagtttttttatcaatagatccaaaatctgagaagtcagcattattgaaatgaactttaagaatatattgaatatcttcttccacttcacataggttaaattgaaaaaataagtgctttgacttaaagtatccaagttgaagaataaaataaatcttagattttattgaacgtaaagtatataacaattcagtttccatttgagaaagagaaaaatattgtacgcgctctttagttgtaaaaagaggtctactataaagttgatttatttcatctgtagttaaaatagttaatcttttttgaatattcatatttaatcgttttctacatctccttatgaattataattataatagattacaccgtgtcaaaaagtatactttttgacacggtgagtttgagtagtttttaatgtttcacaattataacataattatttttgaaatatgtcatgagagttgtatagaatttgacattaaaatataataattatatcttataaccaacaaatttttataaatatagattgtgtgtgatttgaaatgggggaaggaatacataatgaggaaattcttttatattagagtaagtagtaaagatcaatctatcgagagacaactcgcaaccgcagcagagataagtattcctgaagaatacatctttatagaaagagcaagtggaaaagattttaaacgtcctgaatatcaacttatgaaacgtatgttgagaaacggcgatgttttatatattcaatccttagatcgcttgggaagaaataaacaaatgattttagatgaatggcaagaattaattaaagaaaaaaagattgatatcgttgtgttagatatgccacttcttaacactatgaaatataaagatttaaatggaattgaaactcttatttcagatttaattttacagttattaagctatatggctgaagatgaaagaaaaagaatccgcgaacgacaaaaagaaggaattacaattgcacttcaaaaaggagttaaatttggccgcaaaaaagttgaaattgatgataattttaaagaagcttatcaagaatggaaaaatcataaaattactgcagtagaagcaatgcaaagagtaggcatgaagagtaatacattttatagaagagttaaagaatatgaacataatttggaagaaaagaagctctcttaaatagaaaagcttctttttacatactaccctatttcaagagaaattattaaaagtcaaataaatcccctttaaataatttgatttttcgttattttttgtcagttatgtgttataatgataatgtacatgtaaaatggtttgaaatattagtatagactcattcaggaaaagcgcgttctacaatagaacgtgcttttgtgacctgctaattttccttttgtatgtttaaaaagagacatccactttaagaaacgaagcgctttttcttccttaaaaacatatggaaaatcttcagaaccttcacgctcaatatctcttaaaaatcgtttacacgcttgtttatgcttctgacaagcaacaacttcaccatgtaatacatcatcacagtagtccatcatccattgtctgatcatgttatacgtcaaactccttttctacatttgttttcggaccttgtttactatttggaatgacaattttcgctcttgcactcggtgtaagaccaaactcaacagccaaagccttcatttgttcatgtaactgtttcttctttgtaagtagtggatggggaactttattcgtttcagctgccttattggtatattcaacaagaagtccttcttctcggataattttggtgcattcaacatagtcagagtaagcatcgcaatacgttgctaatgcattcacatctatgtttgtaataacatctagctctagtaattcaccagcaatccgtctaaattctttcttagcaattgaatctaaccacgttggtggttttaccttgtccttttttgcttgtaactgtttttcggcttttaatcgctgctcaatttcatcttttgtcaatcgatttgtattaccttctaataaatgcaaatgaatcggtttcgctttccttcctatgtgaaccacctccctcggctgaacccccttttatggaataaaacgaactttttgcacggaaagctaggcggcggtctccaggaagtcgccttttgctttttcatagtggggggatgcttatgactttttctttcgaattattttttgtttttcttctcatcttcttttgttttcttgttatggcaagcatggcaaagcgtttgtaaattagatggttctaatcgtttcgaccaatcaacacggataggaatgatatgatcgactacatcacctatcttaatgatgtccttacttctacattgaacacataagccatgatctctacgataaataagctcacgcatttccttccacaatcttgagttgtagaatgaacgtgagcttttgtttcgaatatgtttgtcataatattttactgtttctttttccttttggatatgtttagcacaatacttatcccgtgttagttcgttgcaacctaacgacttacacggcttaaatggtttacttggcaccttccatcctcttccttaaccgtttcatttcatcctcgattgccagattatttttattaatccggtcgtgatactttgtaatgtcagcttgatgcttacgaatcttatcgttcacatatgcagcaacatgctcatgaccacaatgtggacagatgtagaaacacttctcaattctttttggaagctgtgctacttgtggttgcatatcgtaatctttattgcagctagaacagtagacttgcatctatcctcactcctttagaaagaatatttcgattatatatttaccaaataaatacaagttgttataataaagttaacattgccatcaggaaaagtgattcgcaccccaagcgagttgcttttcctttttttatggctattgctttaagaattcatccaccgctttttcaagcaaactaatcatcgcttctctcttttgctttggtgttgtattatcttgcatttcattaaagataggaagtactctttctaatttctgtttatcgatgcgttcatttacaaggtcttgtcctagcattgaaatgaatgtaccaattacaaccgcttgttcttgtttagttagtttcatttgttatcacctcaggttaaaacctttctttaatttcagtaaactcactaactttttttgctattgctttaccatttaaaataactggaacttctataaataaagaatcttttttatttgtaagcctacccataaccttttctagcttctctaacgcttccgcacattcatttgcagcttcagtcacttctttaattccttccattgcttcggttgtatcagcgctgacctcaataattaatttgttattagccattttgtgaatcctccccagattgtttggtttatcgttgaacatgagttatatcagctttcgttgctaacgtttcttctagcatattgacttttctattcaatgcttctatattcgttgaaacattaagtaatgcttgtttcataccatcattatctctttgtaaatcgttaacacttctttctaaattagcaattatttttgttatagattccatccttcatcctcctccaaaataaaaagcacccgaatggatgctttttatttactctaaattaatcgctcttaaagcagctaattttttctgattttccattatatacttatgagattgatgtaacgcagttaaaatttctgttctctttgtaacatcaggaacttcaattaaatcaaacgctgttcttgactctgttttaggcttgtcttcttgtgagtcgtaatatgtaatactctcaatttccaaaccaccgggacttaaagccaatttaaataacggagagttatttaaatccccacctccacgagcacggagtacaatttcatgcaaatgactctcgtcactattccacatgtctttccaagattcttcaaattttgtaccatcataaatattagttacagcccaaccatgcttctcgttatatcttaacttcgcacctaatacccttgtcttttcaacaaaatttttgatgaaatactcattacccaggaagagattagtcataatatagttgaactcagcttcaaatacctcttgccaaatggcatctaaaacacctgtgattctagttcttgctgtagttctacttaaattttttggtgagtaatctctttgctgaattaataactttcgatggttaaaatcgattgcaaatattgtacgttcccatggctcaatgttttcaattgatgtttcttctcgatctgcatctattgatgtttgatctggaatatattgttcatgaagtgcacctacaaacaccccattttcataattaaaatctttatttacacaatagcgtaatttgtgctcgcctggaaagaaccccatgctaaccaccttttgaactacctgcttccaaagcatttcatcatttggaagttgaataatttgataaacttttaaattcaaacaaaccaccccttcgttaaaattggaatacatttcaattttaacagaagatggaatgttattaaatataatattaagaatttaaaaaataatcactgtattttccgaaggaatccaaaactctgaaccatctcccattacgactctataatcaacctctcctctatccatctttatatcaacaacttttgccaactctccattatacactccttcatcagaagttataatttccacttcatttggttttattaaattcttcatatttaccctccatattgatattaatagtccattttattcaaaatgaaaaaagatatacactataatgtatatcttttttattagttataatataaagtacatgaagttttacccttcttccgatcacctaatgctgttacattcatttgcgccaacatgattaagtaactggaagaagagcaaaagctctccttcataacggatatcattcaatcattaccatctgctggtttcggattttatgtgccgtcattacgaaccgtttagaaatttaaaaacaacatagtgaattgtgttttccgccacttctcacaatacaaatataacacgataattccaaaacaaccggcacatttcctgccaaaaagcggtcaaaactctgccactttttttatctgcctcatttcaaacgtttccacttcacttgttagttccacctgaactccgagaaacgactgatccaaattcttaattttcttttcaattagccaatcaggataagctaattgctctaatactgctctatagtaatcttggtttaaccttaatgtgttcggcttttctccttgctgcatttgatattgaaccaatgcttgtaataactcttcacacatcatctgttccacctctcattcattctatataacttgtatacgtcatgtgcatattttataccttccaattacccatatgtttaattgtgtgtttgtgtatccaatatcactagcgcataagaggaaatcgattactgcatcgttcatattttctttctcaactagcttagctaaacttacaagattctttttctccgtctctaataaaatccctagagatatcatccaaattagatttaaatatccaacttcattttcccctatatgcctcaaatcaataagagcgttgtcaaaatctccttctattgtatggatagcttctcctagggaatattttgcaataatatcctctaactcataattaaagcttgataagtaggttccttctataatactattattatccttagaatatctttgaattccctttttctcaccttcttctaaacttttaatatcctctttattttcttgaataaactctttattatattcaattccttctctacatttttcttctataattaaataatctctcattctatttgattcctcctatagatattatgattatttagataaaaaaaacagtgataattcctaattagttctgcatcaatcttacttctagctcactagatcccttaccaacattacccttatagatactttaacacaaactaaaaaatccacagtgtaaaaagttgaacactgtggattcttacatttattttccttgataatgcaccatatcataagggtagtataaagtattttttaaacttgaatcatctaattttaaaatctttacgattgctccgctttcgtaactccaataaccattgtagatatcatttttattttcatgtgagtcataccagcctgtatcactatgccccttataccatttcccctctaaatattctttcaattcctttactgattcttctttattctttgcattgatcacatgataaattgatttatatgggtctacaaagataaattctgtggtattcccttcccaattttcatctttataactaaataaaaaatcaatcaaataatcattcaatttctctttttctaccaacttttctaattcaattatataatcttttgaaacatcaagcattatcccaatagaaagaacccacaataaatctacatatctatatttgccactccacccctttttcatcgcctcaattatttcggggtaaaaatctcttagtacttccataggtcttcccattgaatataaacaattaaatttatcaatacaaattgattcaatatatccataagctcttttaatactacctaaatcatttgatctttcattttttacttttattgctaattctttatatttttctattctattattctgtctatttaaataatcctcgaaataatcttcattttttaaaatatctctcatttcattctccttactcaattattttcttcccagaagaatccaaaatgtttttaaccacattaccatccttgtcaacattaattagtatattttgtacattttcaggattcaaaagcatttcttctcgaattttatctgccatttcttctccaacagttgattccaaacgtctagaaccatctatccatatttgacatttgtcgtccatctttagttttccccaattgtgaactaccaaactttgcttcatcaataacatatttgatctttgattctgcatttgcattttcgtataatccatcaattccttttactattttatcatttatgcctgatggtgcactttttccgactggctttaaatcaaatccagcttcttttaaactttgattattcaataaattgtcactagattttatttcaccataattacctttttgcttatttgtagctgtttttgcatcaaaattatctacagttgtatttttgttactgctaggtttaccgttagccgcacctccaccagaagactggattttttgaatagtatccttagtattttgaatcgatttatcccaaacaaatccaccatgtacaaaaagacttgccccagtagctgttgctgctatatctaatggaataacaattggtgacgctaatccgccagttcctacttctgcgacgatcgttaagaaattagatccgcctatgagcgaaatagcttcaaacatttctacaatggacccggctatttaataatattgtccagctttttctaatgtttctttacattgaaaaacatactatataacatcaattgaagcctatgtgcctgtgaaatgcgaggtacgaaagtgcattcgcttaaataataattttcaatttaaatcaacaaaagagacctcaaatgtgaagtctcttttgttgattattttccataagtaactcgccttttatttgtttattttaagacagataacatggttcattcaaatatatatcctaaagaaaaattttttcctgccgtcataatctagtagaatagattcaattaattcttattaattgcgataaactcactaggaatctcatctgctaaccaagctttttcatttcctaaataaaatttaacgccttcttctctagctttttcagtattaacttctaaaataataggatgcttatcttttcttttccccactaattcagcagttacaatatcttcagaaagatggacatattgtctatacataggtgatagcccatttaattcaatagaatttaaaaagcgaggagatgtaccatgataaagaaatttaggtggaacgccttcttcctttactattttcatgggaatagaatgttcatacaacgcacgaattttattttcttttagctcatgccttttttctcagatttctcaatcattatttttaaatcttctatcttcacatctctccattcaatggattggtgaagtgcgtgtaaaagttgctcaacagacacccagccattctcatctaactccaattcgtattcccacggagcatgacgtaaagcataagatacttattcaattaaatttttaaatgattttgattattgtttttttcacttcgattgtaatctatcatttctttcatagcacattcaacccaatcccaaaagtcatcaaattcttttcttcgttcaaaaccttcacaagtaaaatcatgaataaattgaactttacttcctttgtcgatttcaaaacatgcagtatcatcattatcaaatcttttagcaaaaggaatcagcttacgattaggatatcttttcttcataccagagtatatgttagtagcctgttctgattccattaaaaaccatatatcaaaattaactaaatctaatttgactaataaggtaacagtttaaatgccacctattatttacacatttctctttcccatactctttttccgtcagttaaaaacactgcacttggcggatcatcatagagagaaatttcaaccaatgaacttttttcttgttttaaccaattatatacagtaccttcgtttgtattaggtcgagataaaatattatttactctaaatacagctgcatcatattctgtataatttatatcatcctcatctagtccattgtctgtttcaaaaactgtatctagttctccaataatcctcaatccacttttccattctagtatcatgtcactatgttcataatttattaatgttccaattaaagaatcgtaccccattcgcatcctcttttcttatgatttttatggtctggatggtactatatgagcgccatcaagaccataatgaatcaaccctttagtagtctcatggtattcaccagtattgcggtcataatattttcctattggctcaccaaagtctactctttctctaccgttttttaatagttcaccttttcctgcaaacttatcaagcaattcttgtgctattttattatcgccatagaaaatgctcttattttttccatttgctaattcttgtttatagttcggtgtatcaggaatatgcttctcttgagctcctgctttcacttttattggataaccatttacttcacggtatggacctttaggtacagaatcttttccataagaaggtattcgattactcgcacccttacccccaccagaagactggattttttgaatagtatccttagtattttgaatcgatttatcccaaacaaatccaccatgtacaaaaagacttgccccagtagctgttgctgctatatctaatgatggcagagaggtcacacccgttcccataccgaacacggaagttaagctctctagcgccgatggtagttgggaccttgtccctgtgagagtaggacgtcgccaagcaactttaagacgagtcagaatgactcgtcttttttgtatgctttcatacctctatcaattgcatttttaaccccttctaaataagaaaatccatattttttatctggctctaagtaagttccttccgcccactcgttccatgcgttaataaataaaaactcgctgttataaaaagagtaagtccgatgaatttgcttgcttaaatatatggtgaacttttcaggggtagaacctacaaagatgctgctattcgcgtttttacgtcgtgcagtattatcccaatcaacaaaagcaccaggaaatgtttttttctttgggagcgatcgttgtaatatatacatccatactttatcgtagtcccaaacgtttaattgcatatcagaatcatatattaccttatttatgtctgaagagctatcatgggcaattgtatagaaaggttcaaactgaatgctagcatcgaatccatttatattaggtagtggaaaactgtttaatgtttcagcaaagtatataccttttaaaccattttctcgcgctaatgcattccagtaattaagcattttttcacaatcaggaatatgtcctggacgataaataatgaatagaggtttatcatctatataaatatatctctcatcttggaaagcctgtaataaataatcaaagtgttccttccaatcagatatatctccgtagtcttgaggcattaatatatgtttatcgagaccatcccaagattttgtccatggttcatttgcccaagaaagacaaaaagggaagtcaggttctttcatctttagtacctcattaaagggtgtttctaatagtctttttcctttaaaccagtaatgataataacaaaaaccatatataccgtatgctttagcgatttttgcttgccactttcttacggagggggtagttaagtcgtaataaaaatcttgataaggttccctaggttgataatgtcctgaaaataaaggtcgtgcacttttagtatttgtccattcagtaaatcctttcccccaccatcgatcattttctttaatttgatggaattgtggtaagtaaaaagcgattattttcaagttatatccccctcgtgtttttcgtagttcaagtgttgggaagttattcttgatttggtgaagcaattttaaaataagagatatgttatctgtttactgttttttttatggtatgtattggattttttaagcttacttaataagagagtattaggtaatttgatatatatctgaaatagaaagtacttttcgtcatgaaatttattacgttgaatgaaaggaattaaattttttgaaggacaaagagggcctgtggtaatcgatttacatcatcaaaaaagtcttgtagctttaaatatttctcataatgattttcaatataagtcctaggtataacggtttctccgtaaaaactactatttctagcatcccctgcaccagtagggctatgaacaaatttgccgttttcataatccgagatggcgcgatgtatatctggaaaagcttgagataaagttttatgccatcctgtttgaattaattcaggatgttcttgaaattgttgacaaaaatcaagaaaatagcgcgcttgtgttgttgcgatgaagattccaccagggcgaagaactcttgaaaattcttttacccaattttcggcagttgcttcggataaatgtgagaatacagaataagcgaatatgatatctaatgaattgtcgctaataaaatctacagggggatgtgggcttgctgttttatatatccctcttcctagtgtttcattacaaagtgtgatcatcgcaggatcgacatcaatgccaagtaaattttgatcagaggcatctttaaataagaagcgtataattcttccccatccgcatccgaagtctaaaactttactttctttattcaagggaactcctaaattttgggcgtattcttttatatggctataaaacaaatatgcttcgtaaagagcatgttcataagaagcacctacaaattgtttttgaatttcttcaggaggaaacataggtacgggaaccccatttatcgttgtttgtgaacaactttgtataaataaatttagaagttcggcatcagatagtgaattaacaagatgatcaaaatcacttcctaacttaaagttattcatttgttaaacctccgaattatatagtgattaaactttattttcttgctttttactaatgaaaacatgtaaaaattcagcatctaaccctagtgatctatccttttgtaaaaaaacaattgtatacatgtttgcatgtgtataaatatattcaatcatatcctgcccccaatcgaacgttactaaagatccattctcatcaatagggtttccatgataaatgggctcttcaatatattcaatcacctctttattcattcttgctctttgcacagtttttgtgagtgtatgataccaagggacagtaaatacatgagcaccgccaggttttaatactcgttctatttctttaaaggctttgtttggcgtcattacatgctcaaaaacgtcttgagtaatgaataaatcaaaagattcattttcaaaagtcatgtcttctaagttctcacatctaataccttgaaagtattggccaagaggataatttctaaagtattgagaataagtatagtttttacagttttttaatagtagctgagtcgtaattcctccaggagaggattcgtgaatattataggaatcccattttggaaaaaatgtatgtaaagcatggattaaagctcgctgccttggtatagagttacatgtagaacataaataatgatctctaagccaatcattatgctctataaatgtagctttcttttcgcaaataacgcagtacccattattgtgtttcaaattgatttccacacgatatccctcctatgttaataaatgcaatctatgtatggaaagtatgatacacgtcaacaatcggcgaaattaaaggaaatgggtgaaagttaggtatctcttaaaattacgattaggagaagggaataattagttggagagaactcccactcgaattaaagtttcactttatgctatgcgatgtatcagcttttattcgtggaaaaatgtatagacttaaaatatccctttcgtgtatgggtacatttcaaaatcctgtgcgtatatttctgtaactaaatccatagtttctttatcataaaagctttcgtatgttggaaatcggggaaagcctggatctgtaatgctaagttctgcatagcttcctgcataaatcatcttgtgagcgcgatgatgatctgaatttgtaagaagtgctaaaggggatttcatcaaatcgtacatgtgttccatcttggtgatttgtgtattaaaatcttctaaaggaatatagcattgaatgaaattttcttcaccagggacgtattgttgactaaaatgtatatctaatgatagggaattggaaccgaatgcctgaacgtaatataaaaattgtttaaatgatattccttgattactatatttatcattataaaaataatgacggatgctctcccattgtgggctagcatatggattgtcagcaagtaataaaaatgagctgacagctcttgtataaggatttcgtacaagtttacaaacattttttttagcctctagaagactattttgtaattgttgaatgtaatttgtactgtttttatacacccagaactcatagtaatgaataaagtcattgtatttctttgcttcagtaaataatccaatttgaaaaaagaaccaattagctaatgaggtgcatccgcttctatgactccaaaatagtattataaatgctaacttaaatatgtacattaacgcttgaataaatatgtacattttcccggagtaacaggaccaaccggagatacgggaccaatcggagatacgggaccaacaggagtaacgggactaaccggagtaacgggaccaacgggactaacaggagctactggtccaacgggagacactagttcaaggacagcaaactatttatatgtttatgatacaactaatcaattaatttcagtaggaagtgccgttatcttcaatacaacaggacctaaaactggatcagcattgacacatgtagcaggtactgacaatattgtaattaatatggccggaacatatgtagctgaatttaatttaacagcggtacaggcaaatcaattttcttttgcactaaatggtacaccaattccagggggacgatatggtacatctataaaccgtatccaaaccacaggtaatgttgctttcacagttacaactgtcccatctacactaactttggttaacaatacctctacaacaggaactgtaacccttttaaataatggaggaggagctttaaccgcagtgtctgctagtataagtatttttgagataggataaaacaattcattttttattaggagcacggtagcgattccttcttttgagagccaattataaaaaaataattcaaaatattatatattttcatttaggagtctcgccaatccaatgacataaaaaccatgctaagacattttgggaagttaaattcttgattttcgtaagctaaggtttttctaagttataaaaaagataaaaagtttgcatttttttgtagcaaaaatgtttatttttgttacgtaagaggattagaaaaaacgacagcatgtatattagataggtgtaatatatatgctgtcgttttaaaatatgagtttatattagtattcaatacattagctaaatctattattttttacacttccataatgattggaagaagcattggacgacgtcccgtttcagtatataagaatgggcttaacacttctacaagtttttgtttgatttgtgcccaatttatcattccctcatttagtaaagtagatatacattcatatacaatattctctatttttttcatcagttcttcggaacctcgcatatatacaaaccctcttgtaacaattgcgggagatgagactaattgcttttgtttactatctaaattcaaacttataatgataattccttcttcagatagaatcctacgatcacgtaatacaatatttccaatatcacctataccgcttccatcaacatacacaggttgagaaggaatagttctactactgattcttgcttctcttttcgaaatttctaatacttccccgttatccataacaaaacaattttctaaaggaagaccacactccatagctaattccacatgcttttttaacatacgatattctccgtgaataggcataaagtatttcggctttaaaagcgagagcattaatttttgttcttcctgtgcaccatgaccagatgtatgaatatcacttgttttgtgatgaattacatttgcacctactcggtataactgattaacaatcctgttaatgcttaatacatttccaggaatcggagaggaagagagcacaacagtatctccagggataatttgaatgtagcgatggtttccatttccaattcgagataaagctgccattggctccccttgacttcctgtacatataatggttatttgatgacttgcaatatgttttatttcatgtattccaacgaatatgtcgtctggagcttggatataccctaaatcttttcctatttgaattgttttttccatactttttcctacaactacaattttacgattatacaaaatagaagcttttacaacttgttgtaatctatgaacattagatgcaaaagtcgcaaataagatacgtccttgtgcttctgaaaaaatttcttttatggattgtccaacctttttttctgacattgaataaccaggaacctcactatttgtactgtcagacagtaaacacaatacaccttccttcccaaattcagcaatcttgtgtaggtttgcttctgtaccaacaggtgtaaaatcaaatttaaaatcaccagtatgtacaatatttccatttggagtcgttactactatgccaaacgcgtcaggaatactatgtgtagttctgtagaaccggactttcatgttttgaaattcaacctctatttcatctagaatattttttatttcaacatgacggatactatgttcctctaatttgcttttaatgagtgctgcggctaatttcccagcatatattggtacttgtatgcgcttaaataaaaaagggattccaccaatatgatcttcatgtccatgtgtaatgaacagaccttttattttatctttatttctttctaaatacgtgtaatctggtataacgtagtcaattcctaataattctgtttcaggaaatttaaacccagaatcaataataagaatctcatctttgtattcaacaacatacatattttttccgatttctccaagtccacctaaagcaaaaatctttgttttcccaacttgtaatttctccatgttccaactcctttatatctaattataaaaattcctgattttgaaagaacagtcttcaaaatcaggaacagtatgaacgttatatgttatttcacaatcaacacaggatattttaccctttttgctactttgtggcttacactccctaataccatctcttgtaaagcattaagtccgcgactccctaacacgactaaatcaaaattccctttattcgcataatctacaattgttggtccgggttctccgtgtaagattttaatttcgtaagacacacctttcgataacaacttttcttcaatgggcaagagtctcttacggcgtgacaactctaattcttcttttccttgtgcatgaagaacttcgttctttgcttttgaaaaatcaaccacaaatacaatttcaactttacaatcctttattaaagaagcaattttgaccgcttcttgtgttgcacgtaaggaatgctcagagccatcgacagctaataatatttttttatacatggtttccactcctaatactggattaatgagatgaaacttttctattcgtattattatatacagctaatttttctacgagttttttactagaagaatttaaattctgtatagtaacgatgttactgttttcacgatatttaataactaccttatcaatagccccgactgctgaatcatcccaaacatgggtatttgagaagtcaataataatacttctgtttttaacattgaaatcaaatgcatctacaaaactttctactgatgcaaagaataattgaccttctacatcaaatgttatataggagtcaatttgtcgtttcactacttgtatctttgaaattttagcaacaaagaatattgcacttaataaaacaccagcaattacacctttagataagtcgtgcgttgcaactacgataataacggtcactaacataactactgcatcgctttttggtgcttttactaaataagaaaatgaagaccaatcaaatgtaccaattgataccataatcataattcctactagaacaggcattggaatttgtacaactaaatctcctaatacaatgatgagaaacattaaaaatagtcctgcgatcagcgtagacagtctaccacgtccgcctgattttacattgattacagattgcccaatcattgcacaacctgccataccaccaaagaaaccattgataatattggcgattccttgtcctcttgattcttggttcttattgctatcggttcctgtcatatcatctacgatagatgctgttagtaaagactctaataaccctacaattgctaaagcgattgaatatgggaaaataatttgcagcgtctcaaacgtaaatggtacatctggaataaagaacgatggtaatgttcttgtaatcgctcctaagtcaccgactgttcgtaagtctaggtgcataaaaatctttattatgcaacgaagtgaaataataatagattaccctagcctcttgtccgccacctttcctccctgtggtcgtcaacgcgtctacaacggtagggtaatctattattatttcacttcgttgcataataaagattacgaatctcactttgttcgatttaccccaattccatttaatccgggaaatatttttatagtataactaccatgcgagtggtcacatcctattattctcatttttgtgacatatttcatatttggtttcttagatttaattaatatatttatcttttttattattttctttcaatctattggaattatatgccgtgattttatcttttatgtgctataattgtccttgtaaaatattttttcgagaaggaggtaagttttgtaaatgaagaaaacgaatccttcatttttaggagttgaaggattggacaagcttgaatatgcagagatggaagttcatctttccaatgtacatactttttcaagtccgaaaccatcagattatttatattcagataaacaaaagggtttatacggatttaaatttgaagttgatgaagagtccggaaaaattatgttatttggtttttgctcgtacaatcctataactaagaagaatggttatcattatatttatagagaaaatgaaaaagatatggattttacaatcatcaacatgttaaagagcatcattaaagattgtcattttaacaacaagatcatttgtcactttgacgaaattgaatccattcttattctgaagttgttaatggaatgtaaaaaattatctcaagacgaacaagtaacgacatttcagagagttttgaagggtataaacggaaagtttcataaaaagagtgggacgtggacagaaccccctattattgaattagatatcggtaatggtgaaagtatcggtgtttctaaagtgttgaatggtagtttggagttatttgtgacaaagggaggcaagataaatacatgtcacacatttcggtctaaacctttttggcaaaagacacctattgaatgtgctagaaatgcaaatcttaaatatgtagaggaaataaaagaacaacatataaactgggatattttttctaaaggttataatagggaagtagataaaaataaccacagattacaagataatacttatgtgaagaaagttttaagaatcaatatgtacaattcctttttagcgaaagatttaattcaagttgtgactaagatgtttaaagaaagctttgattgttacccaaattcattttattcagcaggaacattagcagaagctgttatagataaagttttaaatgaaaaagagttaaagaatttttcaattgattctactatagaaaattggcaagaaaaagaagttgatgttgaaacaatcgcaaaagctattaatataagttttgatgcaaatcaaggtgcaattattgaacatgaaaaagttggttatatatcaaacggagctaacactgatataagttctagttatccggctgttatgaggtattgcatccctgatttaaaggatagtacagttcaatcttttgataatattaaagattttaatgaagtccctaaacctagtttgaatcgtgtagttatgcttacatgtgaatttgaaataccacctaatgttagacatactattatgattaaacaaaaaggtgacgaaggaacagtaaatcaaatcagaaggaatgttttaggatttggtaactttatagcttcagctcattataaagaaatagaatttcttttatctcaaatcgaaccagagaaaaggaaagaagttattaaagaaattatagaggttattgttattgaaacgacaggaaaattacatccaatcagtaaagtgattgataccctttgggaaattcgtttaaaattaaggagtgaagggaagcattcggaatatattgttaaattaatcatgaatgcaatttatggaaagttctttcaagctttccaacaatacgcttgttcggaaaacgaagatggtgaacaggaaatatattttgcgggttttgatgtaggatatatgtttaatccaattgtttcttctatgataacagcattcggaagaataagagttcaagaaggtgctttgaatatagaaaagaatggtggtagagttatttcaattttaacagattgcgttaaattcgaaacaccagattcaaatagaccggcttatgattatttagataattgttttgatagtattttaagtgaatttgaaatgcttaatgtaaatgggtggagtcctaaaggctctaaagttttagggatttttgaagaacctgaagagtttaccgaaggattatttttaaatacagcagtatatgagtacaaattacttaatgataaatgggaagttaaaacttctggttaccaaacatttgataaagagttcgaaaacgaatcttatcttatgaagaagttagaacacttcatagataaacctgaatcgcatttctttaagtatggtaaaagagcaggagaatacggtttaaaattagggaaattagaaatcataaattattttcacatcgttgaagatttagctgattttaggcatttaggaataaagagacataaagagttacctttaatatttgatagtttttctttaaagccaaagagatcgtattataaacatctaaatgaagaaattgaattaagtttagaaacggcaaaagataggttgtttgaaacttcacctgtagatatttcaatggaatgcggtggttttaatgatagttttgaatgggaaacctttgataatcgtaaaaagacggctagagaattactaaagataccaaagatatcagaactaaagaaagctaaaaaagaaaatcgattacaacaaaaaagaaaatgcgatagaaacaaaagagaaatattatcagctttgcaaaagcaaataaaagaaaatattgatttattctctttcgataagtttacgatgaaagagggtagtaatggcggtcacaacgcaagggattatggaattgaaaagatgcgtgatttattgaaaatcaaaaatatagaacctatagcttaaagcggacaatagcagttgtccgctttttgtttatatttaaacataaaaaaagactcgctattagcgagtcaaagaagaagaaaaagtcactttataagacgataaagtgtaagtttcgatgcgaaacttattgaaaatcaaaaataaaaacctataacttaaagcggacacgtttaacgtgttaagggttaataaaaacaaacgttagcagacgtttattttcccttagtacttaatataaacaaaatcttgaacggttaaaactttgtttatattaagttgaaaaaataatgtttttgacaacttgattatatcatgcgtcactttcgttatcaatttttttatttttacaaattctaatgaaatcattcaaaatacgcaaaaaaagagtcatggaatcaattccacaactctttcctattttacaattcttctaaccaaattccactacccggaaattcttgattcaatctatcaattacggcttgtgcttcctctcggcttccatagtcacctaataggattctatgagcgttcccggctagacaagcaatccaacatccgtgacccggtaatatttcgtttacacgtttctttacacccgctaaccaatcaaagctgtcaaagtcaccgaagttcacacggtaatatttgtccgcttttgcgacaggtaagtcctgatagttcttcagatttacatctgtaacactttggacaatagcgcggcaaacggcttcaaatcgttcctcgtacgctttcatattccccggattgtttaagaatgcaacctctattaaaatagcgggagcatttgtcccattcagaaccgctaattccttcccttgcttcgctccacggtttgcgatacctagcgctcttaaaattggtaagacgatatggcgagatattagtaacggtaaacctggtgttctaaaagtgtggaacggtaaaggttgggagcttcttattcctgatgtggaatcaattaaaaaagatacactagagcaggttaataaggatattcaacttacaaaagaagaattaaataagaaagtggaagaagcgcaaaatgaaactgctggtcaattcaaggaagtaacagaaaaccttcaagaagtttctttaactattaaaaatgtacaaaactctcaaggtgaaattgacaaaactgtctctgaaatgaaacaaaccaacgaaggttttactaaatctattgactcgttaacgaaaaaaaacggtgagatcactgagaaattaaatacagtagtagagacttccgatggcacaataaagaaaatctctgaggtacagaaaacaacaaatgatctaaagaaaacaactactgaaatagaagaaaaagctggggaaatcatcgaaaagttaactagtgtagaaaagaaagttgataatacggaaattggtatccgaaatctattactagaaacagctactaaatcccattcagtgaagactggagaaaataagcctcatacctattttggtgtagctaaggatgcggttactttaattcagggcaagaatattgctatgagttttttatttacaggtaaggttactgcatggggtacaacgaataaatgggttggtttcgaagtgaaaattacttttacagacaatacatttgcttatcctagctgccgtgtagaaaaccgtctaacactaggtaaacagtataaacaggaaagatttacagcgagtgctgtagtaatggataagcctattaaagagattttagtttacgctttaggacgtgatttcacaggagacgtgttaattgaaaagcctaaattagaagttggcacagtacctaccgcatggacaccggcaccagaagaccaagtaacgaatgaggaattcaacaagaaaacaaccgagattgagaaaagtgtggatggaatcaaagaaagtatcaaaacggtagaaaaaacacaagttgattttagcgagcgtgttactactgtagagaaaacagcagatggtattaaagaaaatgttactagtatacaagaaatacaaaccaaacaaggtacgcaattacaagaagctaaagcgggttgggaaactactgcaaaagctctggaaggaaaagtagaaataaaagatgttgagaattatgtaggtggtttaggtactgtaaacgagttgcgtgatgctgattttaagttaggacagaaatattggttttggaatagtggtaatggggctactggttctgttgatacgaatctaaaatacaaaggcatgaatacctttgcaattaccgttactggccagactcaagatcgttggtggggacttacaagtcaatttattgagtgtcaggttaacgaagactttgttgcatcaggttatttcaatactgacgggaaaacacctattgatggtggcggtgcatttattgaaattgaatggtggactgctgacaaaaaaactcgcattaaaacagctagaacgaatatcaaggttgtaaatcatacatggattcgtgctgtatgtacagataaagcgccagccaatgcagcgtttgtgagatggcgttattacgttacaagaaatgggcgtttatggtgtgccgcaccaatgttacaacgtggcactatagctacagaattttggttacatccgaaagatcaaacggatgctgacaaaatgatagaagatattgctaatagggtagcaactaaagattacgataaaaaagtaaccgaattagaaagaagtatcgctactaatgaagaaggcgttactatcatttccaaaaaacaggaaagttttattaatgagacctataatgcctatgtaaagaaaacagaatcgaagttacaggtattagatgaagggatcttagcacaaattttaaaagacggtattattacttctattaatatgtcacctggtaagattacaatcgatgctgagaaactgaatattaatgctgatacaatggtgaaatggttaactgcaaaaggcattgatacgaatcttattagaattgatggtgataagataaccattgataaagatggtgtaactgttaaaatgctagacttcctattccaagacgaatggggcacaaaaacaactgcagtatcaagacgaaacctaatagcagatcccgacttttctagtgttacaaagaaaaacattggacataacgattattatggatttgaaggtggatacggtcttacttggaagtcctggggaaatgtcgtaatagaaaagaatacacatatatttgattacgagcaaatggtgaatgccgcaagggtagatatgtataactatccagaagcaatcgtgaataacggtatacatcctggtaacgaatatacagcatcagctcattttagaactgctatgataaatggcgtgcgtaagacaggaaaaccgagaatacacgtatgctgcgttaaattccgagacaacgtaagttacgacatattgagtgaacaaaagatggactttcctgagccgtctacattctacggagaaatcagaaggtattcttttactttcaaagtgccaacaaactatattccgcaacaacacgcattgattattaaagtttgttctggaaatgctgacatgagacaagggacagcgatttgtgtaagtggtgtaacgctatacagtggcaaatatgcatctatgtataattgggatcgtgctgcagcagaaagagcagatggtattcagccgtttaacgcacttgctgtaggtggtgtgaataataatatatctccagcaccagacggacaaacgtttgatataagtactgaaaaagaagttaaaatctttaggaatatacgagcaatgcagggaattaacttaggtggcggtggattccaacagtggggtcatattcgttttacagacggtaatgctggaccgggtttttatgcgagtactccaagtggttggaaatttaacgcacttggatagaaaggaaggattaaacatggatattaactatatgatgccttttcaagaaggtgaaacgcttccttatatgggaagaatagtagacgtgaaacgaacggaaacaggagtctttatacaagtacctgctgacatgttagataatgcaggggtttccaatgatacgagtaaagttgaggtgtggagggaaatgtctgacggaactattggttttagggttttaacgaaatgtgagttatgtggttgtggagccaaattatatgaattgaacttaggagttgttaaacggaacatttgtgcaaatgattattttaaacttacaggtgaatatcctccacaagaaccgccaacaccaactaatgaaaataacacagaaacagagcaggagcagcaatagctggtctttttttattgcctaaaaaggaggggaattatgacagttgaaattggattaattatcgcaatcgcatcagcattaattgggtatttttcttattcgctgaaccgctcaaaagaaattaaatcagatggtcagcaaggggcagaattgaaagcgaaattagaatacatcagtaaaggtgttgacgatattcgcatagatcaaaaggcaagtgaaaaacaaatgattttatttggagaaagaattacaagagtagaggaaagttctaaacaagcacataaacgtattgataccttagaaaaggagataaattaattatgacaaaagagaatataaaaaaacgattccgcaactggaaaacatgggttgcggttttttctttgcttggataacaagagaataaaactgagaacactgttcagggatacacatcaggtattagacagtacataaaatggtttgaaggttcctatgacagaaaattaacaaaattgtaccgacaaaatatcttagagtacattagttatttaaagaatgtcaaaatgttgaacgccaagtccattaaccacaagattagtagccttgctaaatttaatgaatttctaatacagaaaggaagtcaacaagatcaagtaattttaaaaacagacatgataaaggttcaaactgtctatgcttctccaacccaaattgttgaattagatgtaaaaaagtttttacaaagtgtgttagaggataataacaaacgtaattatgcaattgccactctcctagcatatacaggagtacgtatttcagaggcattatctatcaaaatgaatgacttcaatttacagactggggaatgtattattcgaagtggaaaaggaggtaaacaacgaattgtattactaaatagtaaggtacttagtgctatcaaagattatctcatcgatcgaaaaacatacagtacagcacatgaatctccgtatctttttattagtaaaaagcgagaaaagctcgaccgtacggtcgtcaatcgtatctttaaatcatacagcaatgttattactccacaccaattacgacacttcttctgtacgaatgcaattgaaaaaggatttagcattcatgaagttgcaaatcaagctgggcactctaacatccatacgacactactttacacaaatccaaaccaactgcagctaaaaaataaaatggagctcttataaaggagtaaaggggaaacaatgggagttaaacaattactgtcagaggcacaacgaaatgagttaatggatttatcacgtttaacagaatgggatttggtaacatttcatactttttctaaacatgacttacatttaatattaaaacaccgtagaggatacaatcgtttagggttcgctcttcagcttgcattaattcgttatcctggctggtccttaacagaatataaagacattccacaatatgtagtggcttacgttgcgagtcagttacagattccacctgaagaatttttagtatatgccaaacgtgggaatactttatgggagcatcttggggaaattcgaacagaatatggatatcagaatttttcttctgaatataaagaaactttattacaatttttagtgcaacaagcaatggataacaataataccctctatttaattgaaataacaatatctacattgcgaaaaatgaaagtcattcttccagctatgtatgtgattgaagatatcgtctgggaagcaaagcaacaagcagatcagaaagtgtatagtatactacatgacggtttggtccaagaacaaaaagatcaattagatgcgttacttttaccaactataaatggtaaatctccattagcatggctaaaagatgtaccggcccagccttcaccagaatcatttttaaaagtaatagaccgattacaatttgttcaaaaaattggtcttactattgataccacaaaaattaatacaaatcgtcttcggcagctcgctagattaggatcaaaatatgagccatatgcttttagacgattcaatgaagtaaaaagatatagtatgttagtctcatttttattggagattacacaagaccttatagattacgcaattgaaattcatgatcgtcttatgatgaatcttcaaacaaaagggaaaaaagaacaagacgaaatacagcaagcaaatgggaaaaaattaaacgagaagattttacaatttattactgtatgcgggacactaattgaggcaaaagaaacgggtaaagatgcttttgcagccctagatgaagtaatgtcatggaatgagatggtcgaatctgttgaagaagcaaaacaactatcacggcctttaaattatgactatttggatttgttaaatactcgttattcctatgttagacgatatgcacctactttattacgcagtcttcattttagagcgacgaaatctggagaacccgttttacaagcacttgatacgattcatgaattgaatgaaacaggtaaacgaaaagtgcctcatggcgctcccttacactttgtatctaaccgttggcaaaaacatgtatatgatgatgacggaaacattaatcggcactattatgaattggcagctttaaccgagttaagaaatcatattcgttcaggagatatttttgtatcaggcagtagacatcataaggcatttgatgattatcttataccgtatgatgaatggaacgaagtttcaaacattccaaatggccttacagcccctttaaaagctgaagattatataactgaccgaataaaccgattaaatgaacatttagaatggttatcaaaaaatagcgagaaattagaaggagtagatattagtcaaggaaaactacatgttgagcgattggatagaggaactccagaagaagcaaaagcatttagtaaacttcttcatagtatgttacccagaataaaactgacagatttactaatagaagtggccagttggactggatttcatgatcaatttatccacgcctctaccaatcaatctcctgatcaagaggaacagaatattgtattagctactttgatggcaatggggacaaatataggtcttacaaaaatggcggaagctacccctggaatctcctatagacaaatggcaaatgcttcacaatggagaatgtatgatgatgcaatggttcgcgctcaatctattctcgtgaatttccaaaaggaacaaaagttatcatcctattggggagatgggacaacttcttcttctgatggtatgcgtttatccattgctgtacgttctctacatgcagattccaatccacactatggaacgggaaaaggtggaaccatttatcgatttgtaagtgatcagctatctgcctatcatgtgaaagtcattactaccaatgcacgagatgctcttcatgtattagatgggcttcttcatcatgaaacagatttaaaaattgaagaacattacacagatacagctggatatacagatcaagttttcgctttaacacacttgttgggatttcgatttgctcctcgtattcgtgatttggcagatactaagcttttttctatacctggtggagaagaatatgaaaatgttcaagcacttttaaaaggaaaaattaatgtaaagttaataaaagaaaactatgaagatattagaaggttggcatactcggttcaaacaggaaaagtatctagcgctcttatcatggggaagctcggatcatatgcaagacaaaataaactcgcaacagcacttggagaaatgggacgaatcgagaaaaccctctttacgctggattacatatctaataaagccgtaaggagacgggttcaaaaaggtttaaataaaggagaagcaatcaatgcattagctagaattatattttttggacaacgtggagaatttagagaacgtgctctccaagaccagttacaaagagctagtgcactaaacataattattaacgctataagtgtgtggaacactgtatatatggaaaaagccgtagaagaattaaaagcaagaggagaatttagagaagatttaatgccatatgcgtggccgttaggatgggaacatatcaattttcttggagaatacaaatttgaaggattacatgacactgggcaaatgaatttacgtcctttacgtataaaagagccgttttattcttaatataacggctctttttatagaaaaaatccttagcgtggtttttttccgaaatgctggcggtacccccctttgataactaaaaattcttttgtttttcagttgacatactaccgcaggtcttttttatttcattataaaaattcttttacatttaaattcattattcattttgtccatgctacaaagtaaaatccgtcattataattttatctcgaattcgagatattaatcacaaaattacgtatcggcgtctaacctattgaattatctcgaattcaagataattcacaaaaaatatttgttcgatttataaccataataaattttcattatgaacattatttatctcgaactcaagatttattataagttacttattttttattgtcaataagtccttactttcatttttcttgttttcacttatggttccctaccttaacaaacattttttgttctttcaagtgaacgagcacttttcattacatgtgaaaacctttataaacgcctttatcccagtggattacaatgatttttcaaggaattaaagtaataatattcagaagattaaagagtgttttttcacaccttattttcattcctttacccgataaattttaaaaactaaaagccatacaaatgtatgacttttagcttattgacgtctcaaattttgctttctctacatatactttacgaaatttcatatagcatccaatacgccaaggtactatataacaaaccgcaagagtgtagaaaagaatgccgattgactttggatctagaccttgtaaatgtcttctaaaataagcacgtaaaagaacgataactaaaaatgtagcaataaaagcgatacttttttttgcataaatttgaccatcttctctgacttcatacccacttaaaataataagtggaattgacaataacagtccgatcccagcagctataccaatttgccaaccagcaagttgtatcggtgctgcgtataaagaaaaacctggtaataagaagaataatggcaatagtagtcgtcttcctttattattaattggtcgattcatagagcgcatgcgtctaaatataacgagccctatgacgagtaaaaaaattgtaatactgtacgaaccttgctgcaagtgaatctctccctaaaaatagtcattttcaaaaatactcccctattatactcctaatttttccaaaaatataattattcctctaaaaaatcttacacatcaaatatacttttaggtttgatttactataggaaacaattccgaaagaggaactactctccccacctcgtctttaaacacaatatgctctctagttaaatggcgcgggctcttcactcccgccgctgccgctaatgaaaataaactatatctcatactaataatataattcatgactcgccacttcttctcatacggatctaacgctttttgataatgcggattcgtcgtggctacaccagatggacattgaccagaattacattgaagggccataatacagccacttgccatcaaaaacccacgggctgaacttacagcatccgccccaatcgctaaagcaatcgccactttatctggtgtgattaatttacccgatgcaaatactttaaacttgttacggacaccataatggtttgctgtatcaataaatgtaagtaatgctggaataagcggcagtcccatacaatctgccatcgatttatacgttgcccctgacccgccttctgaaccgtcgattgtaataaaatctgggtaaatgtttagttctttcattgtttttattaaatcttccaaaggctcctgctgaccaattacaattttcattccaactggtttaccgctgttttcttgcaactgttgaataaaacaaagtgtatccgctgcattctttaaaaatgaaaatcgattcggtgaattaatcgtctctccctttcggacgttgcgaacaaaagcaattttctcatttactttttgtccctctaaatgaccaccacgtattttagcaccttgcccaaatttcaattcgaatgctctaatattactttctttcgctttctccatgaattttcccattgaaaaattaccgtcttcatcacggtatccaaataaccctggaccaatttgcgcaacgatactcgctcctgtatgtaaatgttctggaataacgccaccttcacccgtattaatccacgatccgcctgccatttttgctccaaaaccactcgctaaaatataattttctccaatcgcaccgtaagaagtcgcagatgcaccaaacatgccatgtagcttccacggatatttacggttctcaccgactataattgcatcatcttcttcgtacagccaaagattcgttgtatccgctgtcaatttttctcttcttgaaaataacccttctttatgaatcacgtactttttaccttcccgctcttgcgtgagattcacacttaattcctcagttaatatcggaaataatgtattagcaatataatatccagaagcttcaaaatctcgttttgatccaaaaccaagtatttcagagcgatatttcgctaaaaacataacactttgaaaatcataacgtgagaaaggctttccatccgtatcatgatcaaaccaatattgtcgaaattcaggccctatcttttccagtaagtagcgcattcttcctaagtacggatgtaattttaaaatagaatggtgtgttcgtttttttataaaaaatgtaatgataaaaaagacgattaaaagcaacattaaaaatagtaatatactaataataacgagtagcgtttcactcatcccgcttccccctatgaaattccataataaaaggagaacactcgatgtgctctccttttatctttattcatactaacgtagcaagatgctctttcgcgtcatattcaactaaactttcagcgtgtttaattcgatgaacaaagtctggattagcaattaacggtcttccgaatgccgctacatcaatcgttccttcttgcaacgcttcttcggcctctttcggatttaaattaccaaccccaacaatcgtaccatcccaatattttcttactagttgatgaaaattctttccgtcagcaatctcttgcgtataattcatcgttgaaggatggatcatcgttaacccaacctctttaaacatatttatgaacgtttcaattgcaaactcaggattttcccacatataagtaggattatcacctttgaaagcagagaaacgaagaagtgttttattagctccaacagcttctattacagccgccgttacttctttcataaacgttaacctttgttttaaatcaccgccatatttatctgttcgcttattcgcaaactcatacgtaaattgatcgattaaatatccgtgtgcaccgtgaatttctactccatcaaatccagcttcgatcgcatttttcgcagcttgtgcgtattgaccgatcacttcttgtatttcttctaacgtcattgcttctggcgtatcaaacggtttacgaaagcgtggaacatttccctctgcagcgatagccgatggtgcttgtggcatttgaccaccaattatttcatgatgactcatacgcccaacatgccatatttgagcaataatcgtcccgccttctttatgtactgcctctgtaacaggtttccaagaatcgatttgttcttgtgtataaatacctggtactcctgggtttccttttgctctcggactaatgacaattccttctgtaataattagtccaattccatccgcagcacgttttgttagtgataggtaaggatttgaagttatctctaccttttcccccactccacacgatcagaatgtggaaagaaggcaaaagaagcttcaccttggtcaaagttggttattccatcaagagaagaaatgatgcagcgcaggaagttaacttatatagcaaattagtttgaattcataaatctttaattaaggagagatggggaatgaagttacaaattgatgaaaagaatgtagctactggtcaatgggttgtatgcgaattgaaggataacaaagttattacacaagtgaaacgagtgattaaggatacttttaacgacaaagtagagttatggggatcgtggggatgcgaaggagcgatacatagtgattggggctacaatcattcgaataaatgtagatatgcaacagtagaagaaatcgatgcagaaagcgtaagacgtgtatttgctcaaaaaggacgtaagccgaacgaatatcgttctggtgatgttgtaacggatgaggtgtatgcatctcgtgttttacacgtaacaggtgatagagcaactgtacaaatcatgaactcgcatcaaatatatgaggttgcaacagataatttagaaattctatttttcgctgaagatatggctggataaagcaagtgaataaatagtttgcttgatctcaaataaaggataaggggattaatttaaaatgcgatatgcaagaggcactcaatatggtttatatgcatgcaagggtaacaataaagattacaaatggtttaaaaaagctaggaaaggtatgggaaatataactattaaagagaacaaaacgttatggccatacaaagaaaaaattgatccaacgtttaagtgggacagaatgatgggaagagtttgttggtcatttgcgaatggggatacggaaactaccatgtttgcactcttaaaatatacaaaaataccacgctggattgctgtgaagataaagagaaaggagtgatgcaatgttctcgttatttgtaggaattatagtgtttattatggtgttgtcatttttatggattgtatcagggaaattaggagtttttgagtgtattggaaacgtagtattaaaaattaaaaacatgtttaaggaggaagaataaaatgaatacaaagaaaatcgtaggtgcagcagtagtaggtttcagtcttttaacaggtggaattctaacagcaatgagtgtgaaggtaatcgatcagggggacatgcaggggttgtttataacagaagtacaggaattgaaaaggaaaccttaggacaaggatggcatttagtttcaccatttaaacgtgtaacagcttatcctatttcaacagaaacggttaaagtagataaatttagcgtacaaaccaaagatggaaagccgttaacagtgagtctatcttatgattacatgaatgatgcagagaaacttcctaagatttataacaagttcaaaggacaagctccagatgtgattgagaacgggtggttgcagactcgacttaagaaagctacattgaacgttttctctaactattcagttcttgaggtattccaacatcaaggggagattaatggagcgatagaaaaggaatttagaaaaatggtagatactactgggttcttagtagattccgttacgttagaagcacctaaaccagacgcaaatacagcgaaagcgattcaaggagtagtagacgctcaacaaaaccttgaaaaagcagagattgagaaaaagcaagctacaattaatgcagagaaagccattgaggaagcaagaggaaaagctgaagcgaatgagattattaagaagtctttaacgccagaaattgtagaaattaaaaagatagaaaaatgggatggtaagttaccacaagtgagtggagaagctaatccattggttcaagttaaataattatatttccaggactttcttaaatgagggagtcctgggttgttatcaaatttgaattttattaaaaagggagagataggaaatgggaaaagtagaaatcacagtagaagaaagaattaaaaggaaaatattttatgattttatattgccagatcatgtatcggaaaatcaaatgaacatcataattgcccgtgtagaaagtcgttcggactgtgctgatgatgttgtacatttgttgcaaaaagaaatacctgggttaaaagtgagaaaagtagaagaaacagacttgaattttgatgatgctgaaatagttggttatgacataagagaaaactaaaccaaagcgttatttgaatagaaagggagaaaaaaatgaaaacatctaaatttcagtttaatagaaatccaattcgtgttcttgagtatagagagattgagcaaccaagtattgatgtattaaagaatacaccagcattatggaatgcttcattagatgatgcactgaaatatggaggagagcttacaaaggctgctattggagcgatgaatttacgacatgaccgcaagtatattgttgtagatacaaaagttcatatgttaatgcctggtatgtgtccggcgattcctaattggcatagtgacggtgttccaagaggttcggaattacgaccggaagcaaaagcaaatccacatatattcgcgcaagaaaaaatgagcactagccgttttcatctacttgttacaggtgaagggtgcttaactgaatttattggacaacctgtagagctagatgtacctgctgaaccaaacacaaggctatacggtatggtgaaccaacaagtaagagaaaaagtcgcatcgggcgaattagaggcatttacagtacctgcatgtacaccagttgagtttgattggtttgatattcatcgtggagtcgaagcaactaaacatgaatggagatatttaattcgggtgacagaaacggatcatatgccaccgcaaacagacttacgtcaaattattagaacacagcaacaagtgtatgtaccaactgattttggttggtaatgagatttatacaaaattcttattttagaaaaaggtgagacagaatgataaagataagtaaatctgaagattttgaagaaaaactacgtcggcacaataaacgaatggaagaagatgaattatatagagaagcaacaaaaatgcttacatttcctgctggtcataagcttgaattggtgattgaggtaacggatgagtattatagtcataatttacataacttgcttagaggaaatatagaaggtgctgaattgctgggatttaaggtaactgagcttgtaattaaacccgaagcaagaaagaagaacgcggtaagagagttcttaagccaggtagtacaagattataatttgtaaaaaataattattttagtggaaagagacggtgtattatgggttacgcaaatagaggaatggcatttgagcttttattaaacaatacatgccgtatgtataaagcggcgaatgtaggagtatttaataagcgccctacaccaataaaagtgataaagacagataagaaaggcaatataactaaaagtgcatgggaaagtaaatctacagtagattatgacggtgtgtacaaaggaagagctgtttattttgaagcgaaatctactgaaaaaaccacaagcttcccgttagataatataagtagacatcaaattgactatttaaaggatacacaagaacagggagcaatttgtttctttttaatagagttcagaacggatcaggttatttattttgttcctgtttcggtagtagcagaatactatgaagctatgctttatgatggaggaagaaagtctattccaagagaggaatttgagaaaagagcgtatatagtacgttcaatccttagtagctgcttaatatatttgtctaattttttgggttcagttcaataatggtggtcttgtttatattggtgagattgtactaggatgatagaatagatttaactgtatgacgtagggtcggtgctgtcctttctcttttttatgtagagggaaagtaggtgactcctatgatggaatatttactgtctttgctacagaatttattgaaagtatttctaggaattattgttattggttatggaaacaagctagtgagtaatattagcaaaacgcaaaagaacctccctacgccgtcggaagcaaaagggaagttctagaaaaagaaaataaatttatttagtaactacccgccttacggcaatagttaccagaagagatggatccaggcatctcttcttttattatatacccaaggtattactgcaatactactgtagtaataattatatctaatgaacataaaaaatcattgtgtaaacaatgggtgtaatggacaaaagaaaagacaccctaaggtgccttcttccgacttgagcaatcctatagtaatgcgatgtcgattaataaaataatttatataaataattcgctatatctttatgtaccctagctgatataatttataaggaaattattggctaattaataacgcacacatatattagggaggtacataagtcatggaattaataatttcttcatttgtattagtagtaatattctttattctttcgatagttttaagtggtaaaggtcagcgaatagcaaaagaagttttaaaagagcttattaatggtcctgaggggaaaatgttggtaggtttttttggatctgcagcagttacaggagtaatttttgtcatttggcttctattaaattaagcattccagttactcagtctgatacaaggtgtaagaaaattactggataattaaaggtacataagccatgttagaggtaattacggcatttttcttactaatcctccattccattgtttatctcttttcaagtggagaaactaagcaaatagcaaaaaaacatataaaagaaattcttaatagtccggatggagtaataatattaattgttgctgcggcacttttaatcggggggatatatttattatcactatgatttcaaataccttagcttaaaacgtataaggaaattaaaagtatacaaatagcacaattataaataatgatatttataattgtgctatttttcatatttatcatatctattattctttcattattttcaaaaggtgaaactcaacaagaagcaaaagaagttgtaaacgacattgttactggttctaatgggaagatactattaatcgttgctgtggtatttgtaattagagggatatttattgttggtagtattgtaaatgatggctatgaatcacctaaaaatccaagtatgcgaaacgatcgtacacctttaaattgtgctcattatggtggagaatgggacaccggtggtctttttggagaagctaaatgtgtttataataaaacttatgaatcggataataaataatatataaaggccttatcttttctataggaagatgaggattttttatgcataaaaaagacacctaaggtgcctttttctaatgtgtttacatccttaattgattgtaaattgatttgaatacgtgaattcaccacgatatttaattacagcgacataattaccacttgtatagctatctgtgataggtgtttgccaaatttctgttccaggaataaattctggttctattgtttggaatcgttctagggtaccatttgtgtggattttataaatttccatttgcgcaccaaaatgttccctaccaaagtgctgtgttaagtaaaatgtatcaccagttattaaattcccaatcttccaatcaggttggtatgtactttcctctgaattttgtaaatccataatggttttgaatccccaatcatcattaagtggatctgagtaagctgcagctgcttgtgaggtaggcttactcatttctactgcagtaaacccactaaatgttaacgctccaattaatgctatttttcctaatttcattgttgtttccccctgccaaatttcagaattatttaaaatcatatacaaacaataatataattcgttgtattatatttcaaatattttctaaaaaaatccagaataaaaagacaccctaaggtgccttcctcttacttatgaatcaaatttatattttgttcactttattcagtatggtgatgatggtctttgtatagcaatagaaccaaatcacgctataagcattagcggacatcaaaacattcaaaatcggtcttttatgtccgctaatacttaacgtaagttttggttccgttgctacacagacgactatatcctctctactgactgtggttgcattttcaaacaacaaaattataaaatctatttatataatcttaatgatctaaattcctcgtattccctcattctcttgcaaaatgtcgctttcttcatgccagccttatccatgtactcaacagcgttgatctttcctaccttccattccttactatcctcttgcatgtaccaaacattagaattgaaacctttgagattactgttcccttaactacaaagaaaacgctaaacttcatatatacttctgagtatgttatgtaatactaattggtttttatgataattattcgtaagtggataattcactacgcgcctcttctattgtatccctagcaattcttaacgattttaaacatttgtctaatttcgctaaatctgtttggctcgcagcatctccatagttgtctataacaaattgcaagttatccatcgcctttaaaatagatgaatgtagaccctttaattctgttgggggttctacatatcgtacacttgagatgagataagacattttatagaaaacatcgcctacttctgaaacccacgatttgtttatagtccccttaatttctgcatcagcctctaaaattctaaatcgggtcgccacatcagataggtcctttaaataatcatccattacccatgcataatgctgcttgtctaaatgtttataatcacttgtttcggctccttgctttacttctttttgatttcctatattttttttatccgcagtgaattcctcaactgctgctgtaatggtttttataccttttttgctaccaacaagagcgtcgatagttaaaatactacagataaaaatcacaaacatggcaatccacttagcccatttcagcataaaaaaactccttacttaatatatttctcctaaattataatacaggattaacgttcattataaacaacatgtctctttacctaataccttaccttctgtttttccaaaatcgacatctttaagtaaatctatatcatgtcaaaaacgatgtttaaatattgtatcattaaattaaaatataacactataatattttcctatcaagaatatttttccaaaccaaaatcattcatagactcttcttttcaccattaaacctaatttatacatattgaactacccccactttcacttcgtttagaagtgagggattcctaagtaaagagttctatcgaactctaattgattaggctaaccccgcagtccttgcggttagaagccttatcgcttcattctttagattgatacttgcgttaatatccctatcatggtgtgtacgacaagaaggagaaatatctatgaattaaatatgcgagcaaagttttttcgttttcagttcgtcatgaaggtattatataaactccttaatttcgaaatacagaataacaaagaaaagagaaaacaaaaattccgaaaatcgaaaaatcgagatttccaatttaacaaattccaaaatcaaatcccacataaaaaatccaaaatcagccccgaaaatttagaatttctcaaaactatattttcaaaaaaatcatcaaaaaacgtgcggtattttatcgtaatatatattactaaaaaaattcatgcgcacactttaagttttcacctcgtacgttagtaaaacaaaattagtagaacaaaatatatctcgaaataaactttaaaaataaatttacaaattcacgaaatttaaatttaagaaaaactcctttttgttaaatcataaaaaaacttttgaatgctacttgctgcactcaaaaatagactcaataaaataagggaactgacttgatataacagtcagttcccttattaaaaatttctaacatttgactttgcttttttcacaaatcaaccaactaaaacaattctttatgacaagtctcacaaatttgcattctaccttcagcatcaccaataattttcgtttttttagattgaatcttgaaacaataaaaacataattttctatttacacctttatgatcaattttttcatattcatgaaactttttacaaccaagacaataataatataaatctcccgctactttcatacactacgcctccacatctacttcattaattaaatgaccgttatactcttgcttctcactctcagataactcttgatactcttgttcaaatttcattaaatccttattccacattgcgattaatctataataatattcattcttgtctgtactcttatacttgtccaattcgccatcttcatattttttcgcataatcttttaataatccaccgtaaacaattaattgacgaccttttaatgctaaatagaacacgtcaaacacttcttgactaaccgacatttcatagtctttcgctgaatacttcgcaacctccgcaactgcatttccttctcgtattaactctactttttgaatatgtacttgcgtaatctctggcatatctgttacttctcgccacatttctaaccattcttcttgcttaatataaagctctttacgtttaaaataatttttatcaacacaaagcaatacatgaaaatgaggattatatgtatcataattcgggttatgatcgtctactttcaatccacgagaatcataatatgcttttctctttttgttgttatacatttcttcagtgatgaatcgttctttatcatacgtcatttctagctttctaatataacccttaatagaacgttgaatattacgtctatcaaataactttttaaaagctttattaaatctatcaatctcacttttcaccatatcagctttaatatttggagtcgtcaacgttaaaaaaagaaactctttcttttcctcaatcttaattgcttccatcatcgttgcgattttcaccgcgtccttccctgctttcctccaagcacaaatcggacaaaatcgatttttacaatcattcccctttactcgtttcttcttctttttatcctttgtagccaaaaattcattaaagatactgcacgatttaaacaattctttcccgctctcactcattttcttctttataaattcgtaaatcttgatattctgtttctttttaggttgtaatttaccagtgatttcatcttgatttttctttgccatatttgatatattagtcctatctgaaaaacatcagaatttctaatttctgaatttcatattcgatataaaaaagggtgtacgaatcctttttttggacttgctcctctcgtggtatttatgatttttaattcgacactaaaaatgataaatctatccgcctgaaaaagcaagtctttttttttacaaacccttgatacataagggctaaaagaatacataggcatcaatttcgttgccgaaatagttacctatgtattaaagaaagaaaaaactcgatttttcgaacacgaaaaatcataaaaaaatgcccctaaatccactccgtggacaggggcattttttttcgttcaaaaccattttttttaacggataaaacatctgagaaacatactcatcttaagcaagttataaaaaacaaattccgctaacgctataaatctaaaaaacaaaaaactcaaacagaaccacactatctctccaatccctggtcccgatttttctgttggctacttcgcacttgttttaatctcttttgttgttcttcatgctcttgtttatgattcaaaaacttttgagcgcctctcacttcatcatcactagtaaaatatcgttttaaaaatttgcaattcatcctgtccaatatactccccttaacgtaaccaatcaccccagccaattcaggaagcttttctttatacaactctttcactcgttccaacgttttcttaaagaaatcattctcttccttcaatcctcgattctctcttttcaattctgttatttgcccctctaaaatacatttctctctatacagcccatctttttcacgtgtaattacacctgattcgtttttaaggcgtctaacatcttctctaagggcttccgacgacctagctaatacttttatactttcgaagtcttccgaggtaatctcgaccgttttagagcgtataaacccacctttttctttaactgggatctcatccacactttttgcttgatctaaagacatttttaaatcatgaagacgactatctattcccttcttttcttgctctagttcttctatttcttgttgtaaagtcaccgctttaaaccgctgcgtcgataaatgttttctatcactagaaacaccacgctctatatcaaatcccttttctttcacatgttcatagattttatcttgtaaatcatgaaactctgatttgtttttaaaaaatgaatacgctgatagtttttgtttttcattaactggaaccatacccacatgcatatgaggtgttttttcatcaacatgtacggaagcatacacaaagttctcttctccatatctccccttcaaaaaacgaagagactcttcaaagaatcgtctctgttccacttgagataaagaattcatataatccggactagccgaaatcatgaacgaacaacaaacaacagcgtctttccgaattgcacgattagatacaacaccattatcaattcgattttgaattaatttcttataatccactttttctttgtcatgaatcagatcataattctgttccgttcgtgcttgaataatatctgaattggaatgactttctttttcacgttgattatgtatttgtaatcctttcacatctctcatcttaaatttttgcatatggcaaatcacgaacttcgacatgggcctcgctcctttttttcgggggtagttccatgtaaacagtagcacactacagtttactgcgtaaacacgtgtgcccttcgggacatttcggctcccgccgagccataacaagcatggcaaaaaaaatcatgggctttgcccaaacccacaagggaaactcttccccttgacccctttcaatcgaactccccaacccctcaatccttgagggactccctcgccggtgaaaatgtacatatttattcaagcgttaatgtacatatttaagttagcatttatacttaagaacaaaaataaaatgaactttcgttcaaagcaactaaaaaactcgtaatgtacttttggtattgaaaagtacacacaccaaataaactctaacgagtttcattttaaaaattatgcagctttcttttgttttccaaacccattatactcatagacaacacccataatatcaaagatagttttcctctcatatcgatgagatttccgtccattcttctgtaggaggtcgaacaaacggattaaaatctttgttagatcttgggtgtttctctgtatcgcttgatataacagcgatacatgatcttgaatcatcccaatagctttatattcacttaattctcttttgttcttttgcaacagaagtttacgcatcttaaacatcgtagaagaacagataaaaatggcaataagccttccatacacatgacattctaatcgctcttgtttgatattttgccaatgatgaatttgaaataaggatttccaagttttaaaaatgatttctatttgccagcgaagggagtaaaagtcatgtatttgttccatcggaacaatcccttcaggcgtatttgagacatatatgttgatacccgttaatcgtttactcttttctgaaaacgtaataccctttttactttccgtataggcttgtttttttctacgttcctgtatctgtttttctgttaaacgatagataattacgcgcgtgaatagtttttgattctttccaatgtaagcttcttttatttcatatgtttgaccgggttttaaatggttcatgatatgttctaaatcaacttgaatatactgtgattgcttttttacggttccgtttcgaaagtattctggagacggattttttatataaacagtatggtttaattttaatctggatatatagtaggcacctcgttgatccatttgatctaagtcttctaatgaaaaataacctaaatcacgaatgcacaagtcacctggacgtaaggtatctaaacattccgttccaaaggtcttatcattatttttccctggacccacctgaaagtttaaaaattgaccgctatgtaaatcatactctaattgaatcttgatacccgctgtttgtgcgcaaccaccggatccaggatatatactagctaaatgttttgggatttgaaaaatcgtcgcatctaaaatacgaatacgttgaaagtgggtaagcgccgtgcttgaaatagccgatgttttacaaagtttacttttccataatgtagaaaaaatatatttcagaaattcaacagcttttttatcaaagcgtttattaagtccttctggactcataagagtacctgtagctgcatgtaattggctacataatcgaacgagggaatcactcgctgtcctttgacttatccaaataaaaatggtagctaattcacttcctgaaaattttcgttttctttttacaaaacctaatttttttgcgagttcttctaaaaaagaaggggttaaatgacggcacagctcttcagaaaatagttgtaattcatcttgaatcgaaagattcataaaaaacgtcatcctttctagttagctttttagaaagaataacgtttttttacacttgggggtagtctagattcttaagttgatgggcatgtggaacaatctatattttgattaatttttcgttggggttactatatggatttttgatgagattccctttattagaaactttgattatagcgggggttattacaatttcttctagtgctatcgttgcaaaagtgctagttgatttaaaaagaacagggaataacgaaacggagctaattttaggaattatcatgtttgaggatatattccttgctgtatatttatcagtggtttctggcttagtacttggtgatcatgcttcatttttaggtgctcttacctcaattggtatagctttgggatatatgctcttattctttattgtagctagatgggctactccgttattaaataaattgttgaatattagttcagatgaaatttttattatagtagtattttcttctttattctttatcgctggtttttctgaaacaattcatgttgcggaagcaatcggagcgcttctgttaggtttagttttttctgaaacagagcatagtgatcgaattgaacatcttgttgtttcatttagagacttttttggagctatcttcttctttagcttcggtttaggtatagatccgttttcgttgggtggagctatatggctaacgttaggtgctgtactactgacaatcatcgggaactttgtagcagggatgattgcaggaaggcaagctggattatctcataaagcatcaacaaatattgggttaacaatagtgtcaagaggggagttttcaattattatggctaatattggtatagcgggtggtttaatgtcagtgttgaaaccgttctcagcactatatgtacttatcctatctattttaggaccactctttactaaagaatcgaaaaaaatatataaatttttaaataaaatatttaggtgggatacaaaatctacttaaacttaggacattgaactactcaccacttaacgtccttacagactttttgaagtgggagattcctgctaagataaccaatgtatccaccggttatcttagcaggcgctacccgtagtccctacagtgagaacataagtatcttgtacattgacgcaccacactccctactttagtttggttttcgcaacttcggcaagcatggggcgaaagaacgttgaagattttacagttgcaacgtttttctgaaaccaacctcataacttcagttttcgaagagcaatctgtataagtaaatgatagcaaatatgttggcttatgcctatcgatattcatatcccacctaaaattggtgtttcacaccttgacatttttgaggaaggagtcttctgttggaaaacgataaaatctttttaattacttgaattctaagtgtagaaactttgtaatttgtatgaattgagggattgaattccttgtgttaattaacatatatatcgatttgatataaagataggatctaaaaggagctaacaaactgttagctccttttagatcctttttaagtatatcgcacaaaaatcaaatcatacatcacgaaaagtagcttttaagaacccctattttaaatgttttgtctagaaaagtatggataacttcatgaatgggtgaaaatatctatgcttttttattacaagacaaagatatactgtactcataaatgtagaaatatctatttaagaaagattgaaatcatatccaataatctgataggagatgtagctatatgacagtattcaatactaaagaaattaataacacaccttttgaaagtaatatcattccaaaaggaaaccgtaaccgtcctgcatattccatgaatccaagatatatcacaattcacaccaccgcgaatcaaaatgcaggtactgatgcaagagcgcatgctagatatgttaacaatggtggtggatcatccagcgtatcttggcactttacggtagacgataatcggattgtacagcacttaccactaaatgagaatggttggcatgccggagacggcttcttgatgttgcctaacttttttcaaaatgtcctttacaaagggtacagattaatttgaaagagtccttttttatacgtgatgacaagcaacaaaatgctctacaccaacattacggaattctggtactgtttttttacaaacatccgttgcaaatgggcaacgtgtatgaaaacgacagcccgaaggtggatttgctggacttggaatatccccttctagtataattcgttctcgcttcactgttggatctggtattggaacagctgataacaatgctttcgtataaggatgtagcggattggtaaataactcatcacgcggtgctgtctccacaatcgtacctaaatacataattccgattttcgtacataaatgttctactacacttaaatcatgcgaaatgaataaataagataatccccttttctcctgtaactcactaaataaattaataatttgtgcttggatagatacatctagtgccgctacaggttcatcagctacaatgaattctggatttaataccatagctcttgcgattacgatacgctgacgttgtccaccagaaaactcatggggataccggtcaatatgataaggagctaatccacataactccaatacttcaattaccttttcacgcacattttctttcgttgctaatccgtgggccaacattggctctccaagcgcttctccaattctcattctcggatttaatgagctaaatggatcttggaaaacgagttgcatattagggcgatgttttcttaattcatccttggataaagaatgaacatcttttcctttaaacttcacttctccctccgttttttgaacgaggcgtaaaattgtttttcctattgttgttttcccgctccctgattcaccaacgagaccaaacacttcacctttattaatagtaaaacttactccatcaactgcttttacatgcccaattgttctactaaatacgccacccttaattggaaaatatgcctttaggtttttcacctctaataatggttcactcattgttccgcacgctcctcatataaccaacaagctactttatgattttcatcatttacatttagatttggggcttctttttcacatatttccatacaatgctcacaacgcccactaaagtaacaaaactcacctaaaccaactaaattcggaacttgccctggaatagaatatagtttatctattcgttttcccattactggttttgatttcaataatcctttcgtataaggatgttttggattttggaatatctctagtactggggcttcttcaataactttcccgccatacataacgacaacataatcagccatttccgctacgacacctaagtcatgtgtaattaataaaatcgacgttttaaattcttctttcacttgtcttagtagatccaatatttgagcctgaatggtaacatcaagagctgttgttggttcatctgcaattaataacttaggattacaactaagcgcaacagcaatcataatacgttgtaacatcccaccgctcagttcatgcggataagaatggacgatttcatcagcgcgggctatgccaactttacgaattaactcaattgccttcttatatgcttcatttttactaagtaattcatgctctcttaacgtttctacaatttgctcccctacagtgaagacggggtttagcgatgtcattggttcttggaaaatcattgcaatatcattgcctcgtaaactacgaagttctttctctttcattcctaaaagactttttccttcatataaaatgtctccacccactacactaccagattcagcaataagccccataatagataaagctgttacactctttccacaacctgattctcctactacacaaactgtttccccttctcgaaccgcaaagctaacatggttcacagcctttactgtcccctcgtcagtttgaaaatgtgtttgtaagtctttcagctctactaccgctttactcatatcttctcacctaccgtctcatctttggatctaacgcatcacgaagtgcatcaccaagtaaattaattgatacaactgttataaagattgcaaaaccgggcggaatccataaccatggacgcttttggaaatcgattaatgagttagctgcgctaatcatgttcccccatgatggtgtaggtggaacgactccaagacctaagtaacttagtgcggattctcccaaaatagaacctgcaacacctaatgtggatacaacaattaaaatgggtaaaacattaggtattaagtgatatataattttccggtaatcttttattcctaacacatccgcagcttgcataaatgcttgctccctaagtgataaaatttgccctcttacaaggcgtgcaagccctggccaacctactaggcttaaaataatcataatgacatacaaacgataatcagacggtactttccactctgataaaatcgcacccattataataagtagcggtaatcctggcattgacattaaaatatctgcaagccgcataataatattgtccacaataccacgataaaaacctgcaatcgctcctaataaagctccaagtataaccgataaaaccattgaagctaaaccaatggttaatgaaatacgtcccgcttgcataagccttgttaaaatatctcttcctaattgatctgtaccaagccaatgagaaacactaggtggtttgttaatgagcgcaacttgtattttccctgatgcatatggagaaaagaacggaccgataaaacaaaataaaaacataaaaattaatgcataaaaccctacaagtgccatcttatttttctttatctttttaaaagcttgtcgccatggtgatgattcgcttctgctctttttttcttttttttctgtaattactgtaacagtctccatttctttccccccttacttcaaccgaattcttggatcaacaactgcatatacgatatctgctaaaaagtttgaaacgattgttaaacaagaaagaaacatcgtaaatgccatcaatactgtatagtcacggaaatttaatgcttctaattgaatattaccaatccctggccagttaaaaatttgttcaataataattgccccagaaaacaatcccggtaattcaaatgctaataacgtaattgctggtaatattgcattttttaatgcatgcttataaataaccgtcttctccttcaaacctttcgctcttgctgttcgtatgtaatcttgtcttacaacctctaacatacttgttctaaaataccgagttagcgagccgaccccatgcccatcaacttaaggatagaaactctacggttttccattaattgaaatcgtttcttaaagtggatgtctctttttaaacatacaaaaggaaaattagcaggtcagagaattgaaccacattccatacaaattttcgtgtttagcaatatttatggatgggtgcaccgaaatacagggttacgtcgatttaaaaaggcatattggcaagtagggcgtaaaaatgcaaagtcacaatctttagcgtgcgtgggctcatatgaagcaatggcctttggtgagaacatgtcggaagtatatgttggtgccacaaaaacagagcaaagtaaaattgtttggaacgaaattaaagcgcaaatgaatgggtgcgaagacctaaaagaaaaattcaatattgcgtatgggaaaattgagcatctcaaaacagattcttttatttccgcgctctcaaaagatgcgggaaaatccggggatggactaaatgttcagtgcgggattattgatgagtatcatgcccatcctacctctgaaatttatgatgttctggtgtcaggttcaggtgctcgtccgaatccactcatgatgattattacaacagctggtttcaacttgagccatccttgctatcgtgtggagtatcaatatgtttctaagattttagacccgaacattgatattgaaaatgaagaatattttgtgatggtcaatgaattagataaggatgatgaaattacgaatcctgaagtctgggagaaagcgaatcctattttatgtagttatgaagaaggacaatcttttttaaaaggagaattgcaatcagcattagatgtcccagaaaaaatgcggaatttcctgactaaaaacatgaatcgttgggtggacatgaaagaaaatgggtacatggacatgcaaaaatggaaaaattgtaaagaaactgtggaattatccgaattaaaaggattggaatgtacagtaggtgtcgatttatcagcaaaaattgatttaacaagtatttcattcgagtttaaaaaggatgataagtatatcgtattaagtcatagctttatgccggaagatacgttagctgaaaagagacaaacggataaagtgccttatgatttgtgggtacaacaaaaatggattaccacaacacctggtgcggtagttgattatgaatttatcaaaacacatattagaaatatggaaaaagaccataaatttaagattaaagaaatatgtgcggatccttggaatgcaacgcaattcatgcaagacatggaagcagaagggtatacgatgatagaaatacgccaagggatggcaactttatcaggtcctacaaaagattttagagaacaagtgtatttaaagaaagtcatccacaataacaatcctgtattaaattgggcaacaagtaacgctataacaaaacaggatgcgaacgaaaatattatgttggacaagtcaaaagcaacagaaagaatcgatccgattgcggctgtcattaactcacatgttcgttgtatgctcaattctggtgaggtagacttaaattcctatattttaagtcaagatttctcattctaggaggaatgacatgcggtttttattatttttcatcagtattttagaagatattctattgattacggggttgtccattattgttgggacgactttttttatgaatccgatttacggctggtatctgttaggggttattctcacaatgttgggggtggtaatgataagaagatagaagggaggtgaaatttttgatttttcggcaattatttagaaatcaggatacgacagatttaaaaaatccttctccctggtttaaaagtttatttggctatcaagccgtaagcggtgaaaaggtaacggttgagtcctctttaggtgttccgacggtttatcggtgtattaacatccttgcaaatagtgttgcgatgcttccgtttcaaacatttaaaaagacagcgaagggaagagaacgggataaggcacatcaagtatcgtttgttctagaaagaagaccaaatccttatcaaagcccatttaaatttaaacatttaattgaaacacatcgtaatacatggggaaacgcctatattaatattcattggggtgtggatggaagaccaaaagaattatgggtattaaatccggctgttacaacgcccactgtggacttaaagaccaataaactatggtattttacgagtttgccagacggtacacctataaaaatacctgatgatgacataatccatcttactacattgtctactgatggtttaagggggaaacctcctattcaaattgcaagagagtctatagggagctcacaagcagctcaaaagtttaaaggtaagttcttcacaaacggggcagcgcatagtgggatattaaaaacagaacaaccgttaaatagagaggctaaaaataaacttcgtgatgcctgggaagaagcaaatacaggtctaaataatgcgcaaaggatagccattttagatgctggtttagaatttgagaaggttggaatgcctttaaaagatgcccaatttattgaaggtatgaaatttgataagggcgagattgcaaatatctttaatattcctttgcacatgattaatgagttagatcgtgctactttctccaatattgagcaacaagcgttggattttattcaaaatacattgagtccaattcttattcaatatgaagaagagttttcttataaatcattttcgtttcatgagcaaaaacgatattacttgaagtttaacctaacaagcttattacgtgctgattctaaatcacgagcagaattctacaaaattatgttagatgctggtgcattttcaattaatcaggtgctggaactggaggatatggacgggattggggaatacggtgataaacaccgtgttgacttaaaccatgtatctattgaaatcgcagacgaatatcaattggcaaaagctaatggaggagtgttacagaagggagatgaggacgattaaagacgtatttacaattaaaaatcaaacagattcttcagctgatctattcatttatggtgacatcataaacaataccggatggaaatgggacgattccgatgtgatgccggatgatgtgaaaaatattttagggcagttggatgataaaagtaatttaaatatctatgtaaatagtggtggtggttctgtattcgctggtttagctatttataacatgttgaaacgtaataaagcgcaaaaaactgtttatgtggatggtgttgcagcttctatcgcttccgtaatcgccttggctggtgatcgtgttgttgtcccttctaatcacgggtttataggtaaatccctttcctaaaaaacctaactttatcatacgaggaggtgatggaagtggattggctacagattaaaaatcaagctgaagatactgcttctctttatttttatggtgatatcgtttcttcttggtggggtgcttgggatgatgaggaccaatatcctgagaatgtaagaaatatccttgatagtgtaaaagggaaagacttaaacatctatataaatagcggtggaggctctgtttttgcaggaatggctatttataatatgattaaacgtcacgaggggcataaaacggttcatattgatgggcttggaggttcaatcgcttctgtaattgcatttgccggggataagttgatcattccttctaatgcatacttaatgattcataaaccgtggaatggtatatatggaaatgccaatgattttagaaagatggccgatgacttagatgcaatagaggaagggatcatcaatgtttataaggataatctaaaagagggcgtagacatcgaagtaataagagaaatggtgcaaaatgagacgtggctaaacggtcttaaagcaagtgaatattttaacgttgaagtggcagaagaaaatactgcggttgcatgtacaagtaatctgtttaaggaatacaggaataccccaaaggcatttaaagagccaagaagagaaccgatgcaaaaaagtgaagaagaaaaaattaataatttgatgagagagatagatttaatctaactctttttttattgctcaattttaaggaggaagaaagatgccaaaagaattaagagagttattgaataagattcagaacaaaaaagcagcagcaagagagttattggctcaaaaaaagcttgaggaagcagagcaacttacaaatgaaattaaggatttgcagaaggaatttgatattgcatctgctctttatgaagatgaaaaaaacaatattccaacagaccctattccacaaccacaaaataatacagtaaaacctgctgatgcatttgttaatgcaatgaaagcggctgtagggaaacataaacttacagatgacgaaaaggaagtattaaatgcaactacaatgacagaaggtgttccatccgatggtggtttaacagtaccaaaggatattcgaacagctatcaaggaattacgtcgtagtgctccagatgcacttgagaattatgtaaatgtagaatctgtatctactcttactggttctcgtgttattgaagtagaagcggactacattcctttcgataatattgatgaagcggcagactttccagaaatggaatcaccaaaatttgaagatattcaatttgctgtaaagaaaaaaggtggaattttaaaattctctaaagaattactcgcagatacagcagaaaatattcaaggatatgttaggaaatggacaggaaaaaaatcaaaagcaactcgtaatgctctgatattaaaagcaataaatgataatttcggtacaacaaaggttccggttagtaaggtagatgatttaaaggacattttcaatgttaaattggatactgcgtttgaaacaacggcaattgccatcatgaatcaagatgcttttaattatttagataaactgaaagattcagatggtaagtacattttacaaccagatccaacaatggcgacgaagaaactgttatttggcaagtatccaattgttgtattaagtaataagacgctaaaaacagatagtaaaacaaagaaagtaccaatgtattttggtgatttaaaagaagcgataactgtttttgatagagaagcattatttattgaattctctgagcaagcattagatttatgggggaaagatttagttggtatgaaagttagagagcgcttagatgttaaaccagttgataaaaaagcgttagtagtgggagagcttacattagcagaacaaacacaagcataagaggggatatcccctcttttttaggaggggtttcatgttaatagatttaaatttggcaaaaaaatggctgagattagaagaagaggatatagaagaggatgatatcttagagcttttaattgataatgccgagatatatgtaaaaggatctgtaggtaagcattacaatgctactgaggataaccgaaaacaagcgcaaaaaatcgcattagttttaatcacaaattggtatgaaaatcgtgatttttctggtcaagtagatgaaaaagtacgatataccattaagagtatggtattgcaacttcaattaagtgaggaaacagcatgaatccaggaaaaagagataaaagaattatgattgaacataaaactgaaaggaaagacgatgagggaaacgcgctaccagcaggctgggaagtcttttctaaagcgtgggcgaaggctgaaactcccgtaggttcagggtttaattctgaagtttttaagggaaatgcagaatttgttattaagttaataaattttacaattccgtacagaaaaggtgttcattctgatatgcgtgtgaaatataaagggaagctttttcaaattaaatcagtgattgatattgatgaaaaacacaaagatatgtgtttaatctgtgaggagcgatctaattggcagaattagaggtcttcggtatagaagaatggattcgtgaattagaaaatttaggacaggatgtcccaaaaattacaaaagaatcattaaaagctggtgcaagggtatttgaagagaagttggaatttaattctccagttggccccgaacctaataaaccaacactaaaacaaccgtggtgggatggtaaacacgcgaagaacgctattgaagaaggaaaggttgtaaaaaaaggtggttcttatttcattgaagttggatgggataaagcggatcgctctcctcacttttatatgaagtttcaaaactgggggactagtaaaaatccaaatcctccacataaaggttttgcagaaaagactttaatccaaagtgaaaaagaggtcttgagagttatggaaagagaatttatgcgtagagtgacaggccgatgagaaattttaataaggaaatatttgatgttttacgtacagatgtagttattaaatctgagttagcctttgataactttaaacgtttatattttttagttgacatattaccgcaggtctaaatttgactatataaattattttaaatctttatcagaaattggaaaaatatataatagttatgtgtggttataagtgaagcttatgaactcaatgaatcataatattaatttatataaaaaaactttaaaaaatcgaaagaaatatgaattacctgccaatatatagtgtaagacaaaggagggctggaatatgaagggtgaaatagattacgcacatttaatccaattaactttatcaggaaataaagaagcatatagcaagttgtatgataaaacgattcaagaaatatataaaacagcacattttttaatagaggataaaacggatgtagatgatgtcgttcaagaaatatacatacaactatatgaatcgcttcgtaagtatggtagcgagaagccatttcgtccttggctaattggacttgcgattaaacaaattcactcttatagaagaaagaggtggatgcgactacgaattataaaaaaagcagaagagcaaagaaagtcagtgcaaattgatttttctaacgatgttgtaagtaaaatatcaaaccaaaaactaattgaactcattcataaattaccgtataaattgaaacaagttattatcttaagatacttacatgattattcacaagaagaagtagcacaaatattacatattccaattggtactgtgaaatctagaattcatgcggcattaaagaaactacgtcaaaaagagcaagtagaagaaatctttttaggagaggtagggaatgtgaaatgagtttagattgtagagttagggaatctatacaagaagaagcaaagggtattgttgccccgccggatttaaaagaaaaagtaattgtacaaataaaaatgaagcacgggcggagtaagaggaagaaacgccttatcgcaggagtacttgcagcagctcttttaatcccgacgacaggttttgcgtaccaatctattatggcggatggtatatatggatcttttgagaatttaaaaaacatgccggagcaatgacattagaaacgtatatgcgttttaatgcaaaattatcagaagcgaaagatgaaatgggttcgaaggaatatgaagagtttacaaaagaactgaaaaaattaactaatgcaaagtttgcgtacggagattcgaacggtaatattgattatgatcaattattaccggctaaaaaagaggaattgaaaaaggtggtaatggagcttcatccgtattttgataaattaaatggccataagtctagtaaagaggtattaactcctgaagagtatgaacaatatatggaagcattaatgtcatatcaaaccgttttagtaaaaacgaaatcgagtggggggataacaatagaagaagtacctgaagcgtacaaagaaagatttattaaagcagagcagtttatggaatatgcaaatgaaaaggtgcaataattagaaaagctcatagccttcttagctttgagcttttttattgaaacaaaaaagagtgttcaattatactttttcatatttgcattatctttttgtataaaacaatctaaaagggaataaccagctattaaactaattatcgtaacaaaagttgtatttattagaataatattaactaaataaggtaggtattctgcaagtggtgaaaagagtagtgctggggaaaaggaaatgaatagtgtaggcactgtaatagcaataaatttatccggttgaaagctccagttttgtttacttgtttcgcgattaatagattgaaggaatcgtaataaaatgccaactataagagggaagagtgtaaagtagaataatcttggataaacgttaaagttcacttgcgtgtctgtatctaaataaaattgaatttttactcctacaaataataataagacgataaataatgtaaagcagaggtatagcatcactttttgcattatattccaccatcctttactcaaaatatattcaaaaaaaagaagagatatacaataactactgttgtatatctcttcttttactgttagttaatagtggagtttgctttttcttgcttcgtgaaataatcaataatgcccattgcactaatttctatatctagatgtaaaatattataaacggaatgatctgatggaacgtttaactttgtaagatgagaagatattttatccattaacaaagtttgtaaagctttagtcgcttcatcgaaatcattatacttttcaaagacttccttaccagtctgaacgaaaataggtagccaatgttccagttgattgtatacttctgtaacatgagaggatgcgccgtaatgaccgaaataaatagtatctacatccatactttgaatatgatttttagaagcaatcatcgcatctggttgaaattgtgaaggggacgttgatggtagatacagttctacaccaacgtttgcgagttctctataataaattccaattgtatcaccagtgaaaatcccgtttgttaatgaatcgtgaatgctaatatggtgcttagcatgccccggtgtatcataaaatgtaaggatacgttcttcggcaatttttaacgtatcaccatgttgtacaatacgaacacgttcttcttctataggaagaattggatcaaatagtttatcaaaatcttctttgtatacagcttttgcacctaaaatgagttttgttggatcaatcatatgacgagcaccacgagaatgcacatataacgtagtatttgggcacttctccatcattaaaccagctgcgccagcgtgatctaaatgcacatgtgtaacgataatgtttttaacatcgtttaaatcaatatgtaattgttgtaagccgtctaaaatatacggaagagaaggggctgcacaagtttcaattaaagtaatatcgtcacctaataaaacgtacgtacctgttcgttcattatgctgtaaatcgaaatcatcaataagatataggtgagaagataattgctctacttttttcatatttaccactcctcgtatagtatgtttaaacttaatttttttactttcatgagagacctgtaaaacatattatatggttaagtcctcgatctattagtattcgtcagctccacatgtcaccatgcttccacctcgaacctatcaacctgatcatctttcagggatcttactagcttacgctatgggaaatctcatcttgaggggggcttcatgcttagatgctttcagcacttatcccttccgcacatagctacccagctatgcccttggcagaacaactggtacaccagcggtgcgtccatcccggtcctctcgtactaaggacagctcctctcaaatttcctacgcccacgacggatagggaccgaactgtctcacgacgttctgaacccagctcgcgtaccgctttaatgggcgaacagcccaacccttgggaccgactacagccccaggatgcgatgagccgacatcgaggtgccaaacctccccgtcgatgtggactcttgggggagataagcctgttatccccggggtagcttttatccgttgagcgatggcccttccatgcggaaccaccggatcactaagcccgactttcgtccctgctcgacttgtaggtctcgcagtcaagctcccttatgcctttgcactctacgaatgatttccaaccattctgagggaacctttgggcgcctccgttacactttaggaggcgaccgccccagtcaaactgcccacctgacactgtctcccgggtcgataagacccgtaggttagaatttcaatacagtcagggcggtatcccaccagcgcctccaccgaagctagcgctccggtttcaatggctcccgcctatcctgtacaaactgtaccaaaattcaatatcaggctacagtaaagctccacggggtctttccgtcctgtcgcgggtaacctgcatcttcacaggtactataatttcaccgagtctctggttgagacagtgcccaaatcgttacacctttcgtgcgggtcggaacttacccgacaaggaatttcgctaccttaggaccgttatagttacggccgccgtttactggggcttcagttcagagcttcgcttacgctaacccctctccttaaccttccagcaccgggcaggtgtcaccccctatacttcgccttacggcttcgcagagagctgtgtttttgctaaacagtcgcttgggcctattcactgcggctttccgttaagaaagcaccccttctcccgaagttacggggtcattttgccgagttccttaaccagagttctctcgcacaccttaggattctctcctcgcctacctgtgtcggtttgcggtacaggcaccttttatctcgctagaagcttttcttggcagcggggaatcaaagacttcgctccataaggagcttccccatcacagctcagccttcacgataagcggatttgcctacttatcagcctaactgcttggacgtgcacaaccaatcgcacgcttcttctatccttctgcgtccctccattgctcaaacgataaagaggtggtacaggaatatcaacctgttgtccatcgcctacgcctgtcggcctcggcttaggtcctgactaaccctgagcggacgagccttcctcaggaaaccttaggcattcggtggacgggattctcacccgtctttcgctactcataccggcattctcacttctaagcactccaccagtccttacggtctgacttcactgtccttagaacgctcccctaccactgataccattggtatcaatccgcagcttcggtggtgtatttagccccggtacattttcggcgcagagtcactcgactagtgagctattacgcactctttaaatggtggctgcttctaagccaacatcctagttgtctaagcaactccacatccttttccacttaatacacactttgggaccttagctggcggtctgggctgtttcccttttgactacggatcttatcactcgcagtctgactcctaaggataagtcattggcattcggagtttgactgaattcggtaatccgatgaggacccctagtccaatcagtgctctacctccaagactcttacacttaaggctagccctaaagctatttcggggagaaccagctatctccaggttcgattggaatttctccgctacccacacctcatccccgcacttttcaacgtgcgtgggttcgggcctccattcagtgttacctgaacttcaccctggacatgggtagatcacctggtttcgggtctacgaccacgtactaaacgccctattcagactcgctttcgctgcggctccgcctcttcagcttaacctcgcacgggatcgtaactcgccggttcattctacaaaaggcacgccatcacccgttaacgggctctgactatttgtaggcacacggtttcaggatctctttcactccccttccggggtgcttttcacctttccctcacggtactggttcactatcgatcactagggagtatttagccttgggagatggtcctcccagattccgacggaatttcacgtgttccgccgtactcaggatacattcaagagagaacgaagtttcgactacggggttgttaccctctacgacggacctttccaggtcgcttcgtctacctcgttcctttgtaactccgtatagaatgtcctacaaccccaagaggcaagcctcttggtttgggctatgttccgtttcgctcgccgctactcaggaaatcgcatttgctttctcttcctccaggtacttagatgtttcagttccctgggtctgtcttccttaccctatgtattcagataaggataccataccattacgtatggtgggtttccccattcggaaatcttcggatcaaagcttacttacagctccccgaagcatatcggcgttagtcccgtccttcatcgactcctagtgtcaaggcatccaccgtgcgccctttctaacttaaccaaactaaaaagtaattctacacatgtatgactaccaatatatcctgctccacctgttacaagtattgccataattatagtcctccatatttcattcattataaacttctcaaagtatatcacatatttcttatcctatgtttaacatgcgaacacagaaacttacattttatcccataataattttataacatatacgattctaatcaggtaataaaaaaatgccacataataaaaattatgtgacgtttttttattaaattacgtaacaatatacacttagaaaatgcgcaagactacctaataatacaaaaacatgaaaaatttcatgatgccccatatatttaaactctaaccattttggctttgttccataaataaatccaccaattgtataaaaaatgcccccaagtactaagaaaataatgcctcctgtacttaaattctcagctaacggtgcaaagaataaaacaattaaccaacccatcgtaatataaattgctgtcgataaccaccttggacaactaaaccaaaacatcttaaatacaatgccacaaatcgcagttgcatagactaaacaaaataatagcaaaccacttgctgaatttaatgtaattaagcaaaagggtgcatatgtacctgcaattaatataaaaatcatagaatgatctagcttcctaaagaagtatataacacgttcatttgccacaacactatgatatacagctgacgccgtataaaggaccatcattccaataccaaacaaaataacagctgtaattgcagcaaatgatggcatcttgatagaaactttcacaagcatagctaataacgcaataaatgataatatcgctccacctaagtgagtaaatgcattaactggttcccttacataagtattcataataacacccctcatataattacatgtagttttgataactacatgtaattatatacacatttctttttaaggtcaacatttacaattcatttgtttcgtaataccatatttaaagatatattaaacattaagttccactaagttataaaagtgagggattctacgtggaaaatataaatgaattacttaagacattacatttagaaaaaaacattaaacttgaggatattccaaatgttgacttatatgtagaccaagttgtccaactatttgagaatacttatgcagatacaacgagaactgatgatgaaaaagtattaacaaaaacgatgattaataattacgcaaaagggaaactattcatccctatcaaaaataaaaagtattcaaaagagcatatgattttaattagcctaatttatcaattaaagggagctctctccattaacgacataaaaagttcattagaaactataaatgactccttattaaatgatgattcattcgaattaaatacgttatacaaaaattatcttgctcttactgaaagcaatgtcgaaagctttaaacaagacgtaaataaccgtgttacagaagtaaatgagatttcttccttagaagatacaaagctagaaaaatttctactactaacatccttcgtgactatgagtaatatgtatagacgtttagcggagcaactagtggatgatttaaaagaatcataaataaaaaactatccacctattaaagtggatagttttttatttacttaattgcttcatgaacttttagttgtttccctttaatcgttgtagtcttcatgactttcaagataagtggtccttttccatttaatatttcaacgtaagaaacattatcttgtatcgtaataatacctatatcttctgctgtaacacctttaattttagcaattgtaccgacgaaatctaccgccctaattttctttttcttcccgccattaaagtacagcttcataatgcctttgttgatatctgcatttttatctttctttataattggtttagcatgtatcttttcttcaaatgcagctttctctttcataacttcttcttttgaaggtccaattgcctttggaatttcaaatccaatatactcctcaatctcttctaaaaatctattttcatatggtgttataaatgtaatagcttttccactatttccagctcgtcccgttcttccagtacgatgtacatagctttctttttcaagtggaatatcataattaataacatgtgtaatattatcaatatcaattcctctcgcagctacatctgtggctactaaataacggaattttccttttctaaaatcatccatgacttcaaaacgatcttcttgtaccataccaccatgtattttatcacaaggatagttagctcgttttaattgtctatatacatgatctacattttcttgtgtacgacagaaaataatacagctatcaggattctcaatcgttgttacatctttaagtagtgaaagcttctcgtcttctatcacctcaaaaagagtatgttcaattttatccgtcgtaatcccagctgctttaatttcaatatgaattggtgaattcatatatgtacgagacaatttctcaacatcttctggaagtgttgctgaaaataacatcgtcattctttttgtaggtaattcatcaataattgcctctacttgatcgataaagcccatatttagcatctcatctgcttcatcaataactaaatacttcaaacactctaaagaaagggtacccttctcaatatgatccaacacacgaccaggagtaccaactacaatatgtgtcttttgctttaattctaatttttgacgtgcaaatggagatttcccataaactgccgcagcctcatgcccatcaacttaaggatagaaactctacggttttccattaattgaaatgaacatggcaaagcgtttgtaaattagatggttctaatcgtttcgaccaatcaacacgaataggaatcatatgatcaactacatcacctatcttaatgatatccttgcttctacattgaacacataagccatgatctctacgataaataagcccacgcatctctctccattgtttggagttgtaaaatgaacgtgaacttttgtttcgaatatgtttatcgtaatattttacgatttctttttccttttcgatatgtttagcacaatacttatcccgtgttagttcattgcaacctaatgacttgcacggcttgaatggtttacttggcaccttccatcctcttcctcaatcgtttcatttcatcctcgatggccagattctttttattaatccgttcatgacacttagctatatccgcttgatgcttacgaatcttatcgttcacatatacagggacatgctcatgttcgcaatgaggacatgtgaagtaacacttctcaatgcgattagaaagctgtgctacttttggttgcatattgtaatcttcattgcagttagaacagtagactttcatctatcctcacctcatttaaaagaatattctaattatatatttacaaataaatacaaattgttataatagaattaacattgccatttggaaaagtaatttgccccccaagcgagtggcttttcctttttttatagctatttttctaagaattcatccaccgctttaccaagcaaactaatcattgcttctctcttttgctttggtgttgtattatcttgcatttcattaaagataggaagtactctttctaatttctgtttatcgatgcgttcatttacaaggtcttgtcctagcattgaaatgaatgtaccaattgcaaccgcttgctcttgtttatttagtttcattttttatcacctcaggttaaagcctttctctagtttcagtaaactcactaacttttttagctattgctttaccatttaaaacaactggaacttctataaataaagaatcctttttatttgtaagtctacccataaccttttctaacttctctaacgcttccgcacattcatttgcaacttctgttacttccttaatcccttctaatgcttcagttgtatcagcagttacttcaataatcaatttgttattagccattttgtgaatcctcctcatattgtttaattaattgttaaacatgagttataccaactttcgtcgctaacgtttcttctaacatattgacctttctattcaatgcttctacattcgttgaaacattaagtaaagcttgtttcataccatcattatctctttgtaaatcgttaacgcttctttctaaattagcaattatttttgttatagattccatccttcatcctcctccgaaataaaaagcagatactcagctacttgatcaatcacaacttgacgaactatcaaatgaacttcctaaatcatacgatgaatgcgatgaacatgaagttgaatgattactattatagccaccataatctgaactagagcttattacacttgctgttgtcgtttggattaacaaatcattatttgtactttcagcattcttttttatattgctttgagcaactgccttcttccgtttctttcttttgaaaaagaacatattttttcacccccttaaaaataaaaaaagcacctgctatggatgctttcccttcaatctttcattatttgtttccactctaaatacggaaggaacggtcttttgtcttcttatactaaattcttcaattgttgctatatgctgaggatttaaattaaattgcatcttactccctgtttctatatctatttgtggaacaagaataaacttattgtaaatttccccatccttatctataagttccttttcaatcaaaagactaggctggattggcacaatatattcatttccattggataaaataattttagaatagccactcatcctgattaccacccttgctccataaaatgactgacttatattacattgttgtatacctattttcactatttatattagattatttgtacttttaatacatattaattctaaaaggagtacttcatgaagtttgcacactgtttgttatttatttttgctcttctcatacttatgtttatgtggttcgcttagtaataaaaaagaacatccaaatggatgctccttttatggacggtatcatttaatcagtaccatctgctggtttcggattttatgtgccgtcattacgaaccgtttagaattcaagaaaaacatagtgagttgtgttttccgccacttctcataatacaaatataacatgcttttataaaaaacgtcggcctttttcctgccaaaaagcggtcaaaattctgccactttttttatcctcctcatttcaaaagtttccacttcacttgtcagttctacttcaaccccgagaaacgtctgatccaagttcttaattttcttttcaattagccaatcagggtaagctaattgctctaatactgttttatagtaatcttggtttaaccttaatgtgcttagcttttctccttgctgcatttgatattgaaccaatgcttgtaacaattcttcacacatcatctgttccacctctcattcattctatataacctttatacgtcatgtgcatattttataccttccaattacccatatgtttaattgtgtgtgatgtgtagcatcctcctgcgattagcaagagggtagctactgcccatttcgggtacgataggtaagaatttgatgttatctccaacttttcccccgcctcacaccgtacgtgcgactttcaccgcatacggcgttccatcaataacttttgtattattaaatagtaaatagattcatgttggatcgtagtttatttaccttctcaacctgcttatcactaagcataagctgtttcattagtttttcgataaggttcggttttgtagcatgaagcaatctgtgtgctaattcatgtacaataatgagatttctgtaattatcatcgccaccatcagcccgccttttcacatgatggcaacgtaccatttgggggtagaatgccatctcaacacctgagatttcacatcttccttgtgtttgagcgaagcgacgaatacggttatcattaaactcaatgctacggttgggaacaaaattcctttcaagataagcaaatgcctttttcatatgtgctgctttttctttgtggccgtactttacccgactttcttctgagtaaatggtgtgggcttgagaaaaattcatagcacttgaatgtgacacgttaccgatgggaattgcttgaataccaccaacattaaaagttttgtagcctgatttcttataacctttattacttccattatccgcatggaaataaaccttaccttttaacctattataaataaccctattagagtgataggtgattttgtgaaaacctttgtttacttgtgttgcaactttaaagtagtcatgcacaccacgaatataagcatttaattcagatacttttactggaatcgtattaatgcggatagacttcactttcttcttaatatttgcttgaattgatttcattgaatctttaggaatgtagctttgtgccacaaattttttcttcttagcaactgctttaaattcgattcctagaaataacgacttccttttacgaaggttagtaatttttgatttagattctgagatttcaagctttagattcttttcaatgtagtttttcaccgcatgaaaccatcttttagctgaattgtagctatttgtgaagattttaaaatcatctgcatatcgcacaataaagccttgttttagtttcgttttcttctgtaccctatatcttggtctgttatcttcatagtgtgtattcgttgggaagttatgccattgtgaagctacccaatggtctaagtcgttaagtacgacattggccaataaaggagagaggataccaccttgtggcgttcctttttccgctttaccttcacccacaatttcacatttcaacattttcttaataattgctagaacctgcttgtctcttaccccaatattccatagttgttttattagcttattatggttgatattgtcgaagaaaccctttatatcaatatctacacaatagtgaagcttattaatattaattaaaaagttggtacgagcgattgcatggtgagtcgatctcaaaggcctaaacccatagctatgctcataaaattttgcttctacaatcggctcaagaatctgtttgaaacactgttgaataatgcggtcaagcatagttggtattcctaacggtctactttttccatcagctttgggtatgaaaacccttcttacgctatcaggcttgaagttaattagtttttcacggactagatgaatgatttcatcatctgagaatcctttgtattcattaattgttatttggtcagtaccaggtgttttacttccttgattagatttaatagtaccaaaggcaagttttatatttctttcatcaataatgaaagaatataaatctttgaagttcccaccattttttgattttacatacagaccatctaattccccttgaaaattataatattgtggttgaatactacgatttgccattagtttgtttgttactctcctttataggatttcacctatctactcttactcgattccaaacatattcactataataattattttggtattgacttagggctatccctccactatgtttccatagtttcaacggtactatgcccctactctcatcacattgaactacatttcttctagtatttagcttccctgtagtgacagaacactcgcctataacgattaacatttctgtatgtgactttccacgttccgtaacctctagctgtgcatacgattttaggtccaacctctccacctgtcactttaacaataccatataattgctcccgattttcataatcacgatttttactcatcggtaagtgaccttgcgaacttagcaagaagtccatttctagacattatgggtatagatgggtacattcagttgttcgtctatccttaatggaattactaaccataatcgttttatagcctcccgccctatctaatacgacaagtacctctacttgtttttccacaactcgtaaaggagatgttagggtattattcaggcgacttcacctagcttcatacaataaagccaataggcgctttatcgcatgtaggagtatcagagtagacgcttcaagcttttgttggcagctctcatttcatctatcgagaatacagttatcataaacctttaataaatactgatttatgttctcttttcgtagttcaactacttatagagaaacgtgtcgcacctgtgcgacacgttcctaactgaaaaggttaggcgctgattcaatattcagcagaactattatttcgagaagtcaaatgatagggtaacgccttgaagggcttcctctgatactccgacatgcagcatacaaaagataagcctgtagttgtgtgaagctcggtgaagtcggctgagagctaccgttaaagtatctcgatactacgaaaactgtccagcggtggatggtgtagcctataggccgggagtctaaaaagcactcatgggtagaatggattcaacaaaaccaacgggtaggcagaatctgacgaatcttcgaatgtacgggtctagaacgatgacacatagaaatgtgtgtgccacgagcgtggtgctgatgtggatgagtaaaaatagttgttatgaaagtccatatgtcgttataggcgacatcaagtcagtaggcttaaaggagaaccctaaaagtgttatgcatagatagaaataatggaacgtggaaagccaccaacatggagaacttatcttcgaggaagtgtttgaagggaaggtgtttgtgagattagcaaacgtataaccttcatttatggtggtgagagtgatggcatagtaccggtgaagcaatggaaacattgcagagggatagccattagtctgatgaaagattgaccaaccgtttcaacaagctacgcagtcgaattataaggttcttgtgagactaaaaaaggtaaactctgaaaggagatccgacttataaagaaaactgaaaagcttagacacgctgaatattatgatatgcagtctacactagatgacttgtatcagcaaagtcaaaacggtaacaacttttataaattaatagagcttatgaagatggatgaaaacatacgtttagcatatcgaaatataaaaagaaatatgggaagtctgacagctggaacagatggaatgacaattaatgatattaaaatgctttcaacggatgaagtgatagaaaaagtaagaacgatgtttggttggtatgaaccacaatctgtaagacgcgtatttataccaaaaccaaatggagaccgtagacctttagggataccaaccatatgggacagattatttcagcaatgtgtattgcaaatattggaaccaatatgcgaagcgaaatttcataaccatagttacggttttcgccctaaccgaagtacacatcatgcactagcgagaatgaaatctttagtgaatagaaaaggaaacggatttcactactgtgtggatatagacattaaaggtttctttgacaatgtgcatcatggaaaacttctaaagcaattgtggacgataggtatacgagataagaaattactttctatcatttcaagactactgaaagcagaaattgtaaatgagggtgttcctcaaaaaggtactccgcaaggaggaatactaagtccgcttctatctaatatcgtactcaacgaattagattggtgggtaagtaaccaatgggaaacgataaagacctcacatccatataagggaaatagtgaaaaatatcgagcgctaaagaaaagcaaattaaaggaatgtttcttaattcgatatgcagacgatgcaaaaatattatgtcgtgattatgtaacggctttaaaaatgtttgaagcaacaaaagactttcttagaacacgcctacatctggatattagccttgaaaaatcaaagattataaatttgaggaaaaaagcgagtcactttttaggctttacagttaaggcaaataagaaaggaaacaaacatgtggctcatagcagaatgtgtgtaaaatccagaaaacatgcgtatagcaagctgaaaaaggctgttaaagatataagcagagaacaaacaccagaatcagtatggcgatttaacacgactgtaatgggaatacaaaattattattcagccgccacacatattaatcacgatctagatcacatgagttgccatctcataagaacactctataatcgactgaggcgagattggaaaaaagccactaagagtgacatgtcgactgtattaaggaaaagatataaacgatacaatcctaaattgtataaaatcaaagacatcgtattactacctatccatgcgcagaagcacaaaccggctagaaattttactcagtctatctcaaattatacaaaagaaggtagagagaaaatacatgatacgctaaaagccgtagatagggagacactccgacatgtacatcgtttttatatgaagcatcgaacagtagaatacaacgataacagaattgcaaagtttattgcacagtatggaaaatgtgcaattacgaaacaagaagttggattagtaggttggcactgtcatcataaaattccgttggaatttgggggacaggacaattatgaaaatctggtaattgtactagaagacatacacatagcaattcatagcgatgattcagataaggcaaaatcaatcttaaataagtacgacattattgaagataagaaagtgatgtttgacaagctgagaatatcagcgcgtcgacatcctatctttgcttcaatacaaaagttggtcaattgaattagatggagcgccgtatgaggtgaaagtctcacgtacggtgtgaagtgggggaaaaggtggagatgatgtcaaaaccttacctatcactatggtgcgacacgtttctctataaatagttaataactatgaaatgagaagactatctagattaacacagatagtaataactgatttaacgagtgagtggaatgaaagccttcatgttgagctgaaacactcccaataatactcctacatgcagagaaagttgatagactgcactgtatgaagctaggtaaagacgcatgaagaaagtctaagtacatgacaacatgtatatggcaattgataatgcggttggctataaactaatcatggtgagaatgaccaactggtctgacgaagatacgaatgtacgggtctaaaattcgaatacagtgaaaactgtatcccttgtatggggtaagtcaacgaaaagtaagaatcgaacctatgaaattcgtactatgtaacaatgaacatagagaacttacaggcctatagtatccacctaaaattagatgtacagctagttaaatcggaacgtgggaagcgagagacaactatttaaaccactatcttggggttggttcatataaggtataaagccgaaattgatttactctcgtgaaagcaggggtacagtaccgatgaaattatggaaacatagtggagggataaccccgagtcattaaagaaattaagcaatagtaaccaaatgaagttcataaggtcgagtatgatgatgggactttccaaaaggaaggagcaatatatccatcgatgaacgctacactgagaaacagcgagtactacggtatgcaatccacctttgacacgctatatgagcgcagtaaatataactgcacaaaaggaataggattatatgaaattataacatcaaaagaaaatatactactcgcataccgcaatatcaaagccaatacaggctcaaagacaaaaggtacagatggaataaccatagataattacaaaatgaaaaatgtagaaaacttcataaaggacattagaacagctttaaatgattataaacctcaaaaagtaagaagggtagcgatacctaaagaaaacggtaaaacaaggcctttaggtattcctacaatgagagacagactaatccaacaaatgtttaaacaagttctcgaaccaatatgtgaagcaaaattctacaatcattcctatggatttagacctaatcgagcgacaaaacatgcaatagctagatgtcaatctcttataaataaagggaataaacatcatatagtagatgtagatataaaaggattctttgacaatgtaaatcacaccaagctaataaaacagctatacaacattggaataaaagataacagggtgctaagcattatttcaaagatgcttaaatcaccgatagaaggcgtaggtataccttcaaaaggaacaccgcaaggtggtattttatcaccactactatcaaacgttgtactgaatgatctagactggtggatctcgaaccaatgggaaaacatgaatacgaaacacaagtacacaagccttcacaaatatagagcactgaagtctaccaagctaaaagaaatgtttatcgtacgatatgcagatgactttaaaatctttacagattctcacgaatctgcaaagaagatattccatgcagtcaaagaataccttgaaaatcacctacagcttaatatatcaagagaaaagtcaaagataacaaatattacaaagggtaaatcagaatttctaggattcaacttaaaagcagttaaaaagaagaataaatttgttgctaatactcatgtttcaagtaaacaaataaaaactattttagctaaaaccaaaaagttaatcaaagaaattcaacataaaccaactgtaatatctgtcaacaaatataatcaatatatattaggaattaaaaactactaccgaacagctacgcatgtaaattataattttcgcctaatagcctatcgtctatcacgaaccttatataatcgacttaaaaaccatgtatttgaaaaaccaataaacccttcggttttatataaacgacttcataaaaacaactataaaacatacaaaataatgggagtctatttatacccaatagcagatattcgaactgaaaatgcaatgaatttcagtcaaaacatctgtaattacaccacggagggaagaaaaaatcacaagagaattaaacaaagtgtagaacacgaaatcaataaaatgatgttcacacaaagaaatgacaacttggagtacgaggataatcgaatctctaggtactctatgcagttagggaaatgctcaattttaggaacattcctagaagctgaagaggtacattgtcatcatgtaacccccagaaaattaggaggaaaagatgattttaaaaaccttgtgattgttcataaattagttcatacacttatacatgctacaaagaaagagacgattgttaaatataaaaacttacttcaattggatggaaaacaattgagaaaactcaatatgtttcgtcagaaatgtaatttggatattattgattagttaatttaatgatggaacgccgtatgcggtgaaaatcgcacgtacggtgtggagcaggggaaaaggtggagattgcctcaaaaccttacctattgctatataatacggcgcgacacgtttctctataagcgtttagacgtgaagtgagagtgttgctgaaatttatcttaagcaacaataactaatatatcgagagttggaatgaaaatcgtcatgttgaattgaaacaactccattaatactcctacatgcatgatttgttagtagacagattgtgtatgaagctaggtgaagtcggctgaacgagcctaagtgatttttaatcatatggtgtaggataggtcggatggctgaaaagataactatggtgagaatgtcccttatgggtctgacgaatttgcgaaggtacgggtctaaaattgcactataccgaaaggtatagcacacaagagtgtggtagggtaccgagaagtacgaatctgacggtaggaaatcgggataagcaacgatgagcttataaactctacaggcttatagcaaacacctacggttatcatgaatagctagatatattggaacgtgggaagcaaaaaactgctaaatgaaaacagctactactgggcaggtggatataaggtaattagccgaaattcctttatttttgtgaaggtaggggcacagtaccgttgaagcgtctaatgaacgtggagggatggccccaagtctagtttgttttatgtttaattttaagaaaatgaagctcaatggtcaggtaggaatgtgggcaaaaacctaggaggtttccacagttgagcacaacaatgagatattgggaatattacaatatgcaagaaacatttgataggttatatgaagaaagtcaaggaaataaatcattccatggtctatatgaattgattacttcggagaacaatattcttttagcataccgaacaataaaatctaacaaggggtccaaaaccgctggcacggatttgttcacgatagataattataaaccaatgtataaaaaggaattcttatcattggtttgtaaacaactagagatatacaaaccaaaagcagtaaagagagtttttattcctaagtccaatggagataaaagacctttaggaattccaacaatgtttgatcggttaattcaacaaatgattaggcaaattttggagccgatttgcgaggcgaaattttacgaacatagttatggatttcgtccgatgagaggaacaaaacatgccatttctagagtaatgtttttgataagcagaaatacttttcattacgcggtagatatagatataaaaggattctttgacaatgttaatcacacattacttctaaaacaattgtggaatatgggtattaaagataagcgagtgttaaaacttatctatttaattctaaaagcaccaattaagggatttggaattccaaaaaagggaacaccacaaggtggaatactctcgccattactatccaatatagttttaaatgatttagaccaatggatagcaagccaatggcactattttgaaacatcatatccatatacaaataatgcaaatcaaaagcgagcaatgaaaggtaccaaattgaaacaaggatttattgttcgttatgcagatgattttaaaattatggcaaaggatttccgaacggcacaaaaatggtttttcgcgacaaaaatgtatctcaaggaacgattaaagttggacatttcaccagaaaaatccagaataatcaaccttagaaaaaacaaatctgagttcttaggatatttattatatgtagtacccaaaagaaacaaatgggtttgtaactctaggatatcaaataagaaaaagaagcaaatcaaacttgagatcaaaaagcgaataaaagctattcagttgtcatcaactcggaaaaatgtgcaattatataatgcctatgtacttggactgcgtaactattttaggtatgttacacatgtaaatattgaaatgaaacagcttgcatttaacctatcattagtaatattcaatcgattaaaaagtgtcgggaaatatgaagttccaatcaatgcacctccggtgtttacaaaattctttaaaaataattatcgaacatttaaagtatgtggtatttacttatttccactagcggatatacaaacagcaactatatggaattacacgcaaacccaaacaccttacaatcaaaaaggccgaaagattgccaaacatattgagttaaataaattggtattaggcgaaattaagaaactactaactgcaaatatccctaatgaaagtatagagtacttggataatcgaatggcaaggtattctatgttgaatggaaaatgtgagatacttaaagaatttttaccagcaagtgagctacattgccaccactatattccgaagggattaggcggaacagatgagtatgaaaatcttagaatcattcataaagaaattcatagattaattcacatgacaaataaacaaacgattgaatcctactttcaaaaacactcgttgactgtggaacaagttaaacgaataaaccaatatcgaagagcttgtaatttagaaaaaattaaacaataaacaaattagatggagcgccgtatgaggtgaaagtctcacgtacggtgtggagtgggggaaaaggtagagataacttcaaatccttacctatcactaacaatgatggcagagaggtcacacccgttcccataccgaacacggaagttaagctctctagcgccgatggtagttgggaccttgtccctgtgagagtaggacgtcgccaagcaactttaagacgagtcagaatgactcgtcttttttgtgttttataacttcttttcaaagctaaatattttgaagtgctgctcattttttaaaaggcctttgggtacgtagctatataagttttattcaatttctttcgtgattttttatatctaatttaagattttctattttatttcttaaagataggattcatcagtgtgttaaaatagtacagttgtttttgatgtactttaatataagaagatttaagttagaaaaggagataatatgaaaaagataagtataattactatagtagtcttagtcctgctagtaatcgtgtatatgttagttgggaattatttttataactacgcgttgaatgcgaaacaagaaaaggaatttttgcaagataatcctcatttagtagaaacggtaaatgcgtcgggagatgtattggctgcaaatgaagaaaagaatgcgaacttcgtatcgaagtataaacctaacacattaactatacgttctttcgataaattaaatttaaaaggttatgaatatatgaatgaaccatctagtcataaatgggcaattgtagttcatggatatagtggtagagcatcggaaatgacgaaatatattcgtaacttttatgaacaaggctataatgtcatagcaccagaccttcgtggacacggaaatagtgaaggggattatgttggtatgggttggcatgatcgtaaagatgttttaatttggattcaacaaatcttaaagaaagaccctaatgctgaaatagctctatttggtgtttcaatgggcggggcaactgtaatgatgacttcaggagaagatttaccttctaatgttaaagttattattgaagattgtggatattcaactgttattgatgaatttacttatcaactaaaagatttattccacttaccaaagtttcctgttatgaatgcggcaaatacggttactaaattaagagctgggtatgatttagaagaggcctcagctgtaaaacaagtagcgaaaagtaaaacacctatgctgttcattcatggggatgctgatacattcgttccttttgaaatgttagatgaagtatataatgctgcaaaagtagaaaaagagaaattaattgttccaggtgctggacatggggaagcggagaaagtagattcgaataaatattggaatactgtatggaagttcgtagggaagtatattccggcataattaaagttgttgcatttatatagacgataatcggagggataatggttaatccttttgattatcgtttttttgttaattaggtattctgctataagtgtatttttgtatgtactatatgaaggaggtagagcaaaaacttttgaattccttaatctcagtgctacaatgattgaaaactaaaagttaatgaggtgtttctatgaaaattgaagtttggtcagattttgtatgcccattttgctatattgggaaacgtagattagagatggctttagagcaatttccgcataagaaggatgttgaagttgagtttaaaacttttgaattagatcaaaatgctccaatctattctgggacaagtattaatgaagtacttgcatcaaagtatggaattagtattgaagaagctaagcgtaataacgtacagctaggaaatcatgcagctagtatgggtttaagttttaattttgatgagatgaagccgacgaacacgtttgatgcgcatcgtcttgcgaagtttgcaaaggatcaaggaaaagaaaaagagattacggaaaatctacttttcgcatacttcactgaatcgagaaatttaagtgatgtggatacacttgctactatcgctgaagtttcaggtttagataagcaagaggctttaaatgttattaatgataaaaatgcgtatgcaaatgatgttagaattgatgaagcgattgctcagcaatatcaaatttcgggagtaccttattttattattaatcaaaagtatgctatttcaggtgcacaaccacttgaaacttttgttggtgcacttcagcaagtgtgggaagaagagaatcctgcacctaagttacaagaactttcttcagagggtggaagcgatcttttttgtactgatggaagttgttcggcgccgtcgaaagagcaatagtttttataatagagtagtaccccatagatagttctgtggggtgcttgtatataactatagaagaaatacataagtgaaatctataaaatataaagttttttaaaaaacgtattgacgattatactttagaggtgtaatatagaacaagtcgccgatgacaataacgtcgcaagcgacaaacgaaataaaaaacttagttgacattgaaagatgaaaatgttaacataaggaagtcgcaaatgagcgaccaagtagttctttgaaaactgaacgaaacaaacaacgtgaaacgtcaatttttattttagatgctagacaaactaaattgggatgacaaaaggcattgggaactgaaaaacaatgttgatatgttggattttgctgtctttgatggaacaactcattcggctacgttacaacaacaaaatcttgttctaaaagaagttcgcgatggaagagttgtaccatatgtcattacagaaacagagaagaattcagataaacgatccattaccacatatgcttcaggagcttgggttcaaattgctaaatcaggcattataaaaccacaaaggatagaaggtaaaacagtaaacgaatttatcgatatggctcttgtaggcatgaaatggaaacgtggaaaaacagattatgcaggattccatacgatgaccattgatgaatttatggatccgttaacctttttgaagaaaatagcttctttgttcaaattagaaattcaatatcgtgttgaggttcaagggtcacaaatagttggatggtatgtcgatatgattcaaaggcgtggccgagacactggcaaagaaatagagttaggtaaagatttgataggtgttacacgtattgaacattcaagagatatttgtacagcgttagttggatttgtgaaaggtgaaggcgacaatgtaattaccatcgaaagtatcaacaggggacttccgtatattgttgataatgatgcatttcaacgatggaacgaacgtggtaagcataagtttggtttttatacgccagaaacagaagagttaaatatgacgccacaacgtttaatgacgttaatggaaatagaactgaaaaaacgtattaattcttcagtttcgtatgaagtagaggcacaatcaatcggtcgaattttcggactagcgcatgaactaatcaatgaaggagatacaatccgaatcaaagatacaggcttcacacctaagttatacctggaagcacgtgtaattgccggtgatgaatcttttacggatcctacacaagataaatatgtgtttggtgattatcgtgaaattactgatccgaacgaagaattacgaaaaatttacaatcgaatccttagtaaattcggtgagaaacaagaaatgctggatcagctagataaattggtgaaagaagcgaatgaaacagcaagtaacgctaagaaagaatcagaagcagcgaaaacacttgccgaaaaggtacaagagaatattaaaaataatactgttgaaattatagaagctaagaatccaccgacaacaggtcttaaacctaataaaacgctttggcgtgatattagtaacggaaagcccggcattttaaaaatatggacaggtacagcttgggaatcggttgtaccagatgttgaatcagttaagaaagaaacacttgagcaggttaataaaaatattgaggtcacaaaaacagaattaaaccaaaaggtacaagaagcacagaatcaagctacaggacaatttaataaagtacaggaaggtttacaaggtgtcagtcgtacaatttctaatatcgaaaataaacaaggtgaaatcgataagaaagtaactcagtttgaacaggattctaatggatttaaaacttctattgaatcgttaacgaaaaaagatactgacattagcaataaattaaatacagttgaaacaactgtagaaggtacaaagaagagtatttctgatgtgcaacaaacaacaagtgaactaaagaaaacaactactgaaatagaagaaaaagctgggaaaatcagtgagaagttgacgagtgtagaaacaaaggttaatagtgataaagctggtggacgtaaccttttattaaaatcaaatgttaaatatgaaaaaacagactatctaatcaatcaatatactctaactgaaaattcctttgcgggtgaagaatatacctttgtaattaaagggagtgtcccacaaggacagaaatttggaatttggcagaatggtgggtctagcaatgttggatatgcaacaagtgtttacgcgaatggaataacgtatgtaaccttcaaagcagttgcagctacaagtggaaatgaacgaaagttaagcttatataactatccgagtagcactacgaaatctattgtggaatgggttgccttgtataaagggaataagccgcaagattggacagcgccgcctgaagaacaggtaacaacggatgaattcacccagaaaacaattgaaattacaaaaagtgtggatggaattaaagaaacaatcacaaaagtggaaaataatcaaaatggttttgataaacgtgttgctactgtagaaaaagatgcaactaccattaaacaaaatgtctcattaatacaaaatacgcagacagaacaaggaagacaattacaagaggcgaaagctggttgggaaaatactgcgaaagcactgcaaggtaaagttgagctgaaacaagtagaggattatgttgctgggtttaagatacctgagttgaagcaaacagttgataaaaataaacaagacttattgggcgaattagctaataaacttgcaacggaacaatttaatcagaaaatgactatgatcgacaaccgtttcactataaatgaagagggtatcaatgccgcagcaaaaaagaagtgcgcccataagggtagatttagaattgattaaatagcactaatctaggttaactcacgaaagacctattaccaatcacctcacctagaagggaaacctaaaggggaaaacagcatggtgataaagtcataagttggtcaactactaagatcacgactgaatggcaaggtaaaactcataaataaggatgaaggctacactgcttgaatgatagaccaagggtggtcagcgatacgagtaatgaaaggtagttgatacattactagggaacaaggttataaagaggatagtttaggtcgtacatataaactatcagtgagtctctccctcccagccacagtaagtggaaaaaggtcaaacgtcacatccgacattatgaaagctattctttatctatctaaatggggattgcctaagttgggatgccaccggcatacttgcgaatttggctatgaagaatgacaccaagttactaacaaggtgtgtgacttctgaatacccaataaggcaacggagccttcatagtagtccgagctagggaaagcctagtacatggcgaaggaaggcaacttatccggtctaaaacaaaattggaaggtgtgtgagacacaatgagaaatccaaatgcagtattagacaatctgaataaaaaaacaactaacccagcttataaatttgaacgtctgtatcgaaatctatataaccaggagttctactttgcagcatatcaaaaaatatatgcaaaagaagggaacatgactagaggaacagatgggcataccattgatggtatgagtttggaacgtatcgataaaattattgaaagaattaaaaaccaaagttatcaaccagctccatctcgcagagtatatatcaataaggggcaaaataggggaaagaggcctttagggataccctctatagatgataaattagttcaagaaatcgtaagaaacatcctagaagctgttttcgaaccgaccttttctaacaattctcatggatttagacgtaatcgcagttgtcatacagcactaacacaagcaactaaaatcttcaaaggagttaagtggtgggtagaaggtgatatcaaaggcttcttcgacaatattgaccatcacattttgattaaactgctaaaaagaaaaattaaagatgaaaaattcattaatttaatctggaaatttcttagagcgggttatttagaagattggaaattcaataatacttatagtggcactccacagggaggaataatcagcccaattctatcaaatatttatctaaatgaacttgataagtatatcgaagagtataaaacactatttgataaaggcacacgccgacaaaacaacatagtatatacccaaaaatataagcgactttggtatttaaaaaagaaattcgcagatagaaaagtactggctccacacaatgaattaactgagattacaagtgaagtgaaaaggcttcaaaaagatatacgtacaatgagttcagtagaattaatggattctagctttaagagaattcaatatgtacgatatgccgacgatttcctaatagggataattggttcaaaacaggacgcagaagaagtaaagaaagaccttacggcttttctaaagaataaactaaatcttgaactatcatcagagaaaacactcattacacacggcaaaatgaaagcgagattccttggatacgatgtaactataagtaaccttcaggctgtatacaaaggctcaaacagtagaatagccaaaaggtatgcatcaaacaagtgcgaaatttacatgcctaaggaaaaatggattggaaaacttaaggagctcaaagttcttaaaatcgaaaaagatagtagttggaagtctattcatagggccgaattaataaactccgacaatttagaaattctaagtatatacaatagtgaaattagaggtttatataattattataaactagcaaaaaatgtacacagcctacagaagtttcgctacattatgaaattcagcatggtaaaaacttttgcaaacaaatacaaactatcagtcagcaaaataatgaaaaagtttaatcatgaaggcaattttagaatttcttacacgactaaaactggtcagaagcatagatatttctataatgaacctttgaaaagagtttatgaaaatccaactactaataaagaaatagatatcgttccaaatactatgatatatgcaggacgcaatagtctaatcagacgccttcaggctagtaaatgtgagtggtgtcaaactgaaaacaccgctatcgaaatgcatcatgttaaaaaactcaaagaactaaaaggaaaacaactttgggaaagaatcatgatagctcgcaaccgcaaaacactagcattgtgtaaaaagtgtcatgttgacctgcacgctggaaggttagattgaaattcagaggataagtggagagccgtatacatggaaacatgtacgtacggttcggaggggagcgtttgaaaacctatcacagtaatgtgaaaaggcgttgggcgcttaccctacgacgatgtagaacgtgtagaaataatctctactatacttgatattgtataatcttagcttgatagtgatgtggcggtaccccatgcccatcaacctaacagaacaggttgcccccaaaacgataaaaatgaacttcattgctataaaagactctaatttttcgttttgggggcattataaaattttaacttgatggtggtgggagataccccttcaaaggaatttcctctttaatgtcgaaatatttcgttaaaacgagaatcaaggagagaggaaaatggataaggaatttttcagcaaacattttagtcttgaaaaagttagtgaagggatatacgttgcaatagcaagagaaggcagtggtgccgtagcaaatgcaggctttattgatttaggagataaaacaatagtttttgatacatttaacacacaacaagctgctgaagatttaaaatatattgcagaaaaaataaccaatcgacccgtgacatgggttgtaaatagtcattggcatggagatcatattcgaggtaaccaagcatttaaggaaagtaatattatttcaagtcaagttacatatgaaaaaatgaaggatattcatccatcgagaatcaataagcagaaaaatgatatacaaggtctaagaaattatattcattctttaaaagatcaaataaatcaaaccaatgaccctaagttaaaacatcaaataaactttctaagcgaattggaagtttcattaccaactttgaaattagttttacctcaaaaaacattttgtgatgcaataacgtttcgtggaattgagcgtagtgcacagcttttcacattaggtggtggacattcattttgtgatgcagttctctatattccagaagagaaagtaatattcatgggtgatttattatttgttgattgccatccaacattttttgaagaatcgaatcctgagaattggattcgcattttggaaaaggttagcgatatggatgttgagatagcaattccaggacatggttcaattggaacgaaaatccgcattttagaattaatagactatataactgatttaactgtaattgcacgagaaaaagaccatatcgaagatattaaagtacctaacaactacaaaaattggggttctccagaggtttatcaacagaattttaaaatgctaaaaggaatattggaatgttaaatcatatagaaatcccttttacattccacaatatggggtcccgcccatcgctattaagctaataaaaagaaataccctcaaaatgaaaatatacgttattctttctgtagaatcataggaaaggatggcgttttttgtatgtctatttctatatctgatgaattacaactatttgctcaagagattcaaagctttttatctccaaatatcttacgagatcttgctagagatgttggtttcgtgcaacgaaccagtaaataccaagcaaaagatttagtcgctttatgtgtatggatgagtcaaaatatcgctacgacttctttaactcaattatctagctgtttggaagcatcaacagaagtgctcatcagtccagagggattgaatcaacgatttaatcaagcggccgtccaatttttacaacacctattagctgaactactaaaccaaaaattgacctcatctatgccgatttcttctccacatacttctattttcaagcgtattcgtattttagattcaactgcatttcaacttccagatcccttttctttcgtttatccaggtgcaggaggatgcagccatacagcgggagtaaagattcagctcgagtatgatttattaagtggacagttccttcatattcatataggtccaggtaaacaacatgatcgaacctacggttccctgtgtgtcccaactgtaacagcgaatgatttatgtatccgagatttaggctattttcatttgaaagatcttcaacatatacaagagaaaaaggcttattatatttcacgtatcaaatcgaatacacgtatttatcaaaaaaatcctaaccctgattattttcaagatggcagaatcaagaaaggtacagagtatatccagatagatatggaggctttaatgaactctcttcaaccaggacaaacatgtgaaatattcaacacttatgtaggaatgactgataaagtcccaactcgtgtgattgttcatcggctaacaaaagaacaacaacaaaaacgattacaagatcaaactgtaagagaaaaaaagaaaggaatgaagtattccgctcgtagcaaacgacttagcggtatcaatgtatatatgacaaatactcctacagatattgtcccaatgggacaagtacatgattggtattctttacgctggcaaattggcgtgtccagataaggacacattatctagttggtgaaagtccaatcgggagaataaatccaacatatcaacattgtttttcagttcccaatgccttttgtcatcccaatagtcatttggctggatagctgcaacgatttgatctgttttaaaatccacaacatgcaaaatgccgcttggtgttctcatctatatctctccctataactaacggtcgctttaacatctggtggcattatttcgattaaattttcgccacgtattacagttggaaaattactaaaaatgtcttttaaattaattgcattcttaccgttaattgttacaagacttttttctgtatcaataataattttgtctcttgcatcaaaaatgtaaggcggatcgtttttggtatttaaatttactttccaaaactttaaatcactaactgacatcgcttctacgggcggaacatcttgccattgcataatactaatctgaatttgtgcagctttttccatatggtagttattttcatctgtccaccgcgcaaaacgttctgaatcatctttctctgtccctggtaagaattttgaaatataagcttcccatacatttcctgttctagctatccacaatcgaccaaaatactgattccatgtattcggataatcaccactctcataaatcagtcctgtttttcctggcttgttatcatatccaataaccatcgttccgaaattttgttcagcttgccaaaagaggtcgttcatagcaatttttgaaagaaccttgctattttcatcaagtatcgctatctccactcggcccatttcattaatctttttactcttacatgtaacataagcttgcataatgaaatcttgtactggaccgccaggtatattttttttaacagctgcaccatgccatcctttgcttgtactggtaccaaaatcagaacaatagaattggtatttatcggacttcatttcaccaaccggatcaccatcttccattgaactgactttactccaacctacagtggtagccatttcatcccatataagcctttgatttctttcgacaggtagttgctctgtttttaagggataaccgattctgaagtaatcacgattataaggggactcaccaaaccacacatctaaaaatgtacttggtttctgtgcttcgatttcaataattggaggtgcttctatattcccttgattaataaaagaagttgtaacttcagtatcacctttttgagagaacgtgtgaatattttgttttcctaatttatatggcattggacaaacaaaagtaataacgcctttacctctattaattatttcatccaagtcaacagaaccatcgattaatgctagataagtcctatctaattcatcatcaaaaacaagttcagcaggttgctctgtataaagccaatccgctaaatcttcttttaccttttgtaaatcagccatatcttttttcgctttaattacaagaggaacatcaatacgacgttcctccgtttctgtatgaagaaaaagagcccctgcgcgatgagggactcttactaattttcttttaactggagcccaggaagggcgttttcttccaactagcatttgaatataatcttttctgatcttattaaaagtaaaactgagtttccccaccatgctcaccacccttaaaattccgctcttcttttttggtcacgatcttgaagctttgtcgtatatgcgtaacttccgttcgctagttcttttccatctaaaacgtttgtcatattcaccgttacattcagttcttgttctctacctgatctatccgagaacatagtttttgctgtaggtgcgttgttataaggtgattgtagttgcgtatacccattgaaatcagcaagtgtattatgcgggatactataatgcgaagtttggaatccaaaatcaaaaacagatggcatattccccatctgtttcttaaccgttccaactacattttttgctgcatctacaacaaaacgtttccctttatccataccaaccccaacaccttctggtacggcgctaccgactggaatcatcactttagatggactgttaatttctaacgctccagaaatagtctttttaatctctccagcaatgcttttcgccttactatataacccacctgtcgcatcatccaaacctttttcaagaccttctataattgatttaccgacggaacgtagatttatagtgctgaagaatttttcaactgtattccacttatcttcaatatcgctctttatctcccgcattttgtcattaacagcttttttctgctcttcaaattttcttgaaactgtattttttatttcttccaccttgttgtcggctgaagttttggtttcttcccaccatttcgttatacctgaccaagtttctttcatcttttgaacgacatcatctttcattacttcttcttgatgttgcctaacttttttcaaaatgtcctttacaaagggtacagattaaaaagtacagctacctttttttagaacatcattcgtatacaagagcaaccttagcgtaaacttgcgcttaatggtacttgagaataaactgtgaaattgttactataagtaccatgtttagaaaatgtggaagaaatagaactgttccaactcttgtagatagatccagatgtatcttctcttagaagtacgtttgaaaagctagcttggctaaaagaattacgtccagtatcttcaacgccctgaaccatttttactggttcgtattgagaaaatgagccatatacaggctgatttgtatatctagggattccatttacatacatagtaaccgtaccattgccgttattaattattttaaggtttactcgatcactatctttaattgatgtatcatattgtgtgttccaatacttattgttttgacctgattcattatatcctgaattaagaaatactttatatccacttggtgtttttgaaataccaccttcaactttagatgctccaatacctaaataccaattcacatatccatccttaacaacaactgattttggtaggtttatatcagctgcaattccagtataattactatttgtaacactttttacagcaccttctgtagctgcaaaacttgtagttgaaaacattgatagagaaattagaagtgaaccgactagatacatcatttttttcttacttttccttaatacttgattcatttttaaatcccccttatttgtaattattaaattgtattaaaagttggccaactaactaagacttacaaaccaaagatacattaggtttaattaaatgtatatattttcctgtcataagtcattgaaatgtcaaataaattagaagtttcatatttattaatatagggggaattgacagcatgaagtgttatgtctatttaaaattatgaaggttttgttaaaaataagattaaagcttataaatttgttgggtataatgtgtattacgatttatttaggagagataaatatgaatggaataccaggggtttttcaaaagatatatttgaaattctgagaaataaaataaaaacaaatgaaataaatgaattgcttgtgttaaagaatttattggaatagttagtaggtaaagggaaatatatgatttaaaaggcgtggaattctcatataaaaagaagaaaggtgggcagttatggaaaagacaagatcaaagttaaataatgcaactattgaaggggggatagagacattaaaagatgaaaatgaatgcttacgtatggaaatcgattatttaaaaaagttaaaggccttacttcaaaatgagaagaaattacagaacaagactaagtggaagttttagtctatcattctacgtacaattatagtaacgtgaatagtccgaaataaatttgtttcggactaagggttcaatattctatccagtgtattcaacatttttataaaaagttgaattttctgattttataactgagaaaaatatattacattaattaatagatacttctacagagacactaggaattgttggtgctggtgtatttccaccattagaagattgttgaggtgcatgtaaactattcgtgctatatgctaatgcacttattactaccatttttttcattaataataagaatataatgaatatttaaagtgtccttattctgttgatatagtcaatttgttttaaaacagaccgtctgtaataggcggtctgttgtttgttatggttggcgactgctattcttttactcatctcatattatatttagtttaagaattgagaatagaagaataggattagaaaaattaatgttttgccaaataatttattaaatatacttaaaggaataaacagttctcctattgtaaggctgttgagtttattcttctttggtctttttatcaattctttaaatgtttgaaagtttattttattaacgaaagaccaatttggcatagcttttgtatctgaatctattttgaaaatgatatgaatactatgtgtataaaagttgcctatacttaaaataagcataaatcctaaaataatgaaccaagtcattttttagcacctcctttcagtatttaatattaagatattaataacggtgaggaagtgtgctattgtccatgaaaaatattgagaaattgttgaggaaacgttgagactgttgcaatgcaatcgatcgtaggatagttaactatgcttgtcctgttatatttgttaaaaaaggaaagagaacagttgcgtagactgttctcttaagacctgcggtagtatgtcaactgaaaaacaaaagaatttttagttatcaaaggttcatttgtttgttttgtggtataagattgtacgttgttcttcttagatttaaagcgcggtgcgctgttttgttttttgaaaaagcgtgtataagcatccgcaaggttgcgaacagacgactgaatcgcaatactatccacttcttttagccaaacaagctctttcttcatggcaggtagtttggcagagcatgtaccataggtcaagccttttcctgtctctttgtatgcttgatcccataaggataggaaatgattgaatacaaagcgagaacacccaatcgttttgttgattagaattgcttgtgcctgatttggatagatacgaaacttataggctttattcatcattatttgattcacctccatttcggtatatgactattatacaccaaacgtacattcgataggtagtggagtaacactttctatatgtcgaacaattaagatggcttcctgccatcccttgttcgaagtcaattcatctcccacctactcactgggctgtgccccttcacgctcctttttatctattagtaaaaaatagtcacctatatggttgatattggtgatactgttgatatgattgaaaatgttgtgtcggtatactataaggatgagcatatggatctgctagtggccaaggctttggtttaggaatataccaccatggtatttcaggtgtccaaggtttaggtatagtggttaacataggactctgtctataaaaatatccattcaagttcgttcctcctaacataaatttgatatttatttgatgtattatatctaattgggaacatttatgaatcaaatataattggactatcaaaattaacttttttttcagaattttattgaaaaataaatataatacaattaaacgaactggatactttgctataatggtaatatataacattagtagacttttataggatgggggaatatataatgatggtttcagctaaggggaataatgaaattacaaagctattaagcgattggtatgttgaaatccgctcaaggcgtataggtaatgcacatcaattaaaagaaataattgattctaagatgcataatattgaagaggatcaagatttattactctactactcactactagattttagataccaatttgtaattgataatttaagcgtttcaaaaagcagttttgacaaagttgaggcttttgatatgcctacagataatttcctagcttattattatcactttttcaaagggattcatgcctctactattggcgaatatcaaatcgcaaaggagagttatgaaaaagcagaaaaacttttagactgcattcctgatgaattggaaaaagcggaattttattataaagttggagctttccattatgacatatatcaagggctattatcttataaaaaagtatcagaggcaagagaaatctttgctcaacatgctgggtatgagatcaatgtagcattctgtgataatcttataggcttagcttgtactcatttgagagaatgggagctcgctgaagaatatttcacgaaagcaatggatatgttccaaaaaatagacgaagaacaatttattttaatggtgcgtcaaaatttagggttaatgtatgctactcaaaatctttcgccattagccattagatatctttcagaagtaaatcaaaaaatgcctaacaattataaggctctttttattgaggcaagggaacacatgaaggaaggaaatcactccgtcgccaaagatctcatagcaaagggatattccgtttgtcaagagattgaaaatatagagtatctacaccattttaaaatattagatgcaatgaatggaggttttcctgccgaagcacttgaaatgacagtgttaaaaggcgtatcatattttaaagagcaagaacttttcgaattcattaaggaatacgaagaatatcttgctactgcattttataaagagaataaccatattaaagcaagtcattatttctattcatgttctcaagcaggaaaaaaagttattgagaaggaggcattaaaatgaaaaaggcaattctcggtttagttggtgtaattactatttttactttaatgtttggtgcccaatcccctacagaaacacataaagctattgatgttattcaatatgctcacggaaatcatggtggttaagatcttaatttagcgaggataaaatcgcacaatacactcatagccatactgacggatattaaatgaataaaggtcttcacttcattgtgagggcttttttttataagaaccccacttataacatctttaaaatctactatatgtgaactacccgccacttaacgccctaacggactgtttgaagtgggggcttctcggttagtcgttacttttggtagctgttctatcaggcattacatcaaaaatcagttctgctggattttcagtaataagccactccgctatttcttcttttaacgtttctaaattcgtcccatttggaacaataatccccacaggtacagaaagaggacgggtttcggtatctgtacttaataaccttgcccccggatatccgggggttttcagaaaattcctccttaaaggcgcccatgttggaggattccaccctctttcaatatgaatataactttttcgttctccattaaattcaaaggaactcatcgtctctctccttttatacaaaagaaaagaaacccaaatctaaaagattgagtttcttgcttgtgctctattttgatattcagttacatacggatggctcacacgcgctatttctcttccttctagtatgacaggaatttcaatataagtaggttctgatttcatatagggttgcttatcaggattatcattgtcaggtctatattgaatgacattaggattatcagataatacttctctccatctagaaaggctgcctacatcatgaatagaaagtccctcaaatcgttccatttgacgtccaatttctcttaccatatcacgcatattttcagggatatgtgtaatccaatcattttgccaatctccatctacaaagattgcattaaaatactttgttagtgggtcatcaccttggaaactaaatatttcttctggttttatagaacgaatactatccatagctcctgttactgtatcttgcaatgcatctcgcacaacagaatattgacttttaatacctatcgcaattccttgtgccatacgaacaccagaaaatctcaacttatttgattcactatttaatttcaattcatttacaagagctgcgtttgctttggtacccatttctctactttctttttcagccatgtgagctgatttttgaatacctagcgcaaatccttcactaaacggcttaccaccttgatcacgtgttaattttgatggagagtttacattaagtgtagctttcaatgcatcaaatgcacctcgtgccaaactagctgctacattttgtacattccattgaccgttagatataccgttagcaaaaccactagcaaaagcttctccaggactaagagagctgacactccctaatccatctttaccaccttgagcaacacttgttccgcttgcaacagcggctccacgttttgctcccatatcacttgcgaatttattaccagccttatcaccaccgccaccatcggttgcacttcctaacataccctctacacctaatttaacattactagctgctccgactacattccctttattcccgttaattagtcgttgcataagaagagtagaagatgcgccgccatttccatctgtggttgatcctaaagtattttctacactttgtttaacacctacggccgctccattgacattccctttattattattaatattattaaacatcatagaagtcgcgttattaccgccattattatcagttgtacttcctaattgctgttcaacgcctagtttaatattaaaagcttcacctataatatttggcttatattgagccataattcgattcattaatgtagtagaagctgctccaccatttccgtctgtggttgatcccagtgtttgttctacaccttgcttaacttcctctgcggcttgaacaggttgtcctccattttgacgaattccatctgcggtactttgcggaatagctgccccttgctgagttgtatcaatgtttgttttttgtacaaccatttgtcttataacttcgagtgcctgatctatattaaacttcccattgtgtaagccttgaacaagagacgcaattgtcacttctccattcggccctaagttgtacttagtcttatcttcaatattaactcccaaagtattgagaacgtcttgtacattaataaaccctgtttccataccagtttttaacgtagccattatacgagtgccgtcttttgctaaatctgctgctgttaatttagataactgttgttgaaaaaaaataaacacagcgtcaatacctactgtgccctcgtgtaatccatttacaaattgtgtagttttcatttttccgagtggtcctaaatctatatcgagatttttctttaaatctaagtttaacttagatgcgacctccccgatattcatctgtttaaaaccatcggtaaatgaagtcatgactttaataccttctggtgtcaatggtttattacccatttctgaccgcatagtgtttatgattgcaatcgctacatcttggaccacatcactatcaagctaagattatacaatatcaagtatagtagagattatttcttttttctaaaagccaggcttagaaaatttaaaggtttgcatgcgaaataaaccctatcgggtttcattttttgaattaggccgcttgatcttcagaaatggtagaattgtaaacgacacctaatatatcaaagactgttttcttctcatatctgtgagattttcgcccattttgctgtaggaggttgaacaggcgaatgagaatctttgataattcttgggtgtctttctgtatggcttgataaataagaaaaaaataatctctaatcatatatatggccttatattcactcagctctcgtttctttttcataagaagtagttgacgcatttgaaacatagtagaagaacagaggagaatggcgatcagttgcccatacaaatggcattctaatctttctcgttttatttttttacaatggtgaatatgaaagaatgatttccatgttttaaataaaatctcgatttgccaacgtaaagagtaccaatcatgtacttgtcccatcgggacagtatctgtagaggtgtttgtcatatatacattgataccactgagacgtttactacgaggggaatactttattcctttctttttctctcttacagcttgatcttgcaatcgtttttgttgttgttcatctgtaagtcgatgaacaatcacacgagttggtactttatcagtcattcctacataagcatcggatatttcataggtttgtcctggttggagagagttcattaatacctccatatctatctgtatatactctgtacctttcttgattcttccatcttgaaaataatcaggtgtgagatttttttgataaatacgtgtattggatttaatacgagagatatagtaagcctttttatcttgtatatgttgaagatctttcaaatgaaaataccctaaatcacggatacataaatcatttggtgttacagttggaacacacagagaaccataggttcgatcatgttgtttccctggacctgtatggatatgtaggaattgtccgcttaataggtcatattcaagttgaattttcatcccagcagtatggctacatcctccagccccaggataaatggttgaaaatatatctggaagctgaaatgcagtggaatctaaaatgcgaatacgcttgaaaacagaggtgtatggagaagaaagtggcatagatgaagttaattttttatttagaaggttagtcaatatatgttgtaaaaactgaactgctgatgtattaaaccgttgattcagtccttctggactgatgagtacttctgtggatgattctaaacagctagataactgagctaaagaggttgtagcgatattttgactcatccatatacataaagcgactaaatcttttgcttggtatttactagttcgttgtacaaaaccaacatctctagcaagatcccgtaaggtatttggagataaaaaactttgaatctcttgagcaaatagttgtaattcatcagacacagaaacagacataaaaaacgccatcctttcctataattctacagaaaggataacgccttttttactttatggatagtccaaaaccttaattttatagcgatgtagcggtaccaaatatccgtttaataattatttatgctaactttatatatctgtataatcaaacgttattattcatttttaattgctctaaaagataatcacagacattcacaaaaatacattgtttttttaaacttaataataagtatttcaattcaaattcttgataaaaaatcttagtgatatatagtttaaactcatctaaattaggcttttctgggctatatagcatatctaaaggaagtttaaatttagaaaacaaatgatcgttttgtgcaaaaatcgaaacttcttctctagttaatcgatcatgaaatgcaattgaaatgtttcttaaggcatttacttgttcttcttcaaattcatgatctataacaaatctataaaatgggaattcatctgactgaatcatactttgcataagtctaaattgatatcttaataaagtcacttctttgattaaatccatatttcccctcctttatttccctaaattaaccagtttatcataacaatttataacttgaaatacaaatacttatgatatatcacccatacaatttttattaacataacctatcattatcaatagttaacgatgctaaaaatttcgttatggggtaattaaaactattagcttgatagggatggggtacttttacaggtctctcatgaaagtaaaaaaattaagtttaaacatactatacgaggagcggtttgaatgaagaacaagtttacgcgtatgatcatgttaatggtggtaatggctttatcagttacagcacttgcagcatgtggagataatcgtgatcctgaagaagttgctacagcatattttgaagatgctaaagacggaaatgcaaaagattttggaaagttatttacaccagaagcaaaaaaaatagttggttttattggcggaaatgcagaattaatgaaatcaattaatgaagatcttaaaagctataagattagaaaagttgaagagaaaaacgaaatcgctacagtaactgttgatgctgtgtataaaaaagattctaaaaacgattataaaaaagtaatcgtaattgaattagagaaaactgaagaaggttggaaaattagtaaatcataaaaaaaacggtctagaattctaggccgttttttatttttgaacattttaactcatagttattttacatcttatcctattttttttcttctttgtaattccatgctatttctactacttcttcaggagtcaattcttcatcattccaaaaaattaaatcacttggagcagggtgaggtacagcagagttattaaattgatgaacatagttactgtgttcatcttcaggtaaatcaagatcataaattttttttacaagctcaagcagttctgttttcgtcattttacatgtcatatttttcatccttccgtttaatttatagccctttggtcccgaaatggtatgcgggatctaaaacgttttgatgcattttaggagatacaattattagattatcaagattatagacatctccacctttatcaataggctgtttatgatgtagtatatatttattatggttcccataatgttctgctcgtggtgagtaaggtgccttaccctgcttcataagttttatattcataggactaaattctttagcatagctcgaatcagaaagtgttttccaaaattcttctctaaaatcgtcaaaagatttgaattctcttcctactaatttttctcgaacttcttgcggaataataccaatagcaccatcattatacattaacttcttttgggtacctaaacttcgttcgaggttaaaacttgaggtcactgtacctggggtctttctttttaccgcacttgaagtttttgcaaacatatatgtatctgatggtttaatagtatcaactttataatctatcttaccataagcgaaagctggttctaaacgattttctaactgaagcttggatatagatgataaattttttccccatcttgcaccattacctacggcactggcacctcttgtgacaagtccaaagaaagctaaattagtcgctccgtatgctactgattccgtgatactttctgcatctccatattttatgttctccacataccaatctgataaaacatttcgtatagcatacatctcttggacttcctcgtccaactcatgttttaatgttccaataggattattccacatatctttcataaattcgtatttatctctaaattcctctttcgtatcatcaatagaactctccacaaagtccgtaagtccatattttgcatcttccaatgcgtccattggattatccaccaagtttccgaaaaagtcggatgtttggttccaccctttttttaatggatcaaaaatagtgtcccctgcagccttcccgcttcctcgctgaaaggcgtcccatagcttgcccatctgattaaaatccccaaacgctttctcatccgcttcacggaatgttttcgcagctttctttagttcgagttcagtatgatgtaaatgcttaactaaatcatccatactcctcttttttgagaaaaattcatcgaaaaaccgttgatatgccatcccttcccaagacatctgtaattcgaacgtgacttgtaaaagctctcgaattatactttccatagactctctatttcgtgacatggaatttgcagctgattctaatttatctgggtcaacacgtacttgtcccaattaatttcctcccttcacctatatgtataaaacttctagtacaagtatagaaaattcataggggggtacagacacatgcccatcaacttaagaatttgcactacccccaagtgtcaaaaaacgttattcatccgctattaatataaacaagttaagaaaaacaaaaagagagcatcatattgacaccctcttgacacacagagaagcacacgctaatatcataaacgagtatagttcttaatattttctaatatagataaccaacagtcctgtagaatggggtccaccgccaagtgatccatttcttcaagggctttttttatactctctttagttctacgagggaactctttcatatccatagttccattagaataacaaatcaaacaagcttttaatgcccctttaacattattcaaattaaaaatcgagaatgtataagattcatcaatactaaacggaggactcttccttatttcgtctaccactacaccgtcagagtctctccaactatactcaatacgagtcaaattctcttcttctatcattcttttaaaatgattatataactcctttttcttatcatatatcttcaaatatccatctttatttctatttccataataaacagttcctttatgtctatcctgttgctttcctgttttactataagacacaatatcactcatatgacgctctatatcaaaagcaatatccataccataaaccactcgcttattagacttcaaaactgcatttaacgtatgaaaaacggtttcaaacactttttcataactatctttttgcaactcgttattttcaaatttagaagggttaaaatcaactttcatatcatagctatctttttccttttccgaattatgtttccaccctatataaactgcaccttcaccatatccaatatgtataactctatgataatctctaacagacgtcccatgttctgacctaataggtgtattcggtaaaaaaatctgctttgacgatattttagttaaaacatcactaaattgtttctctgttacatctttatacttaatcattagcctatccaaataaacttgcataaaatctatcccgctccttattttttattaaacatgtcattttgtacacgattttcggctattagaatgtccgaaaatgtcttcgccacatttctacaatttacccacacattgaattatactgttcaatctctatcgtgacttcaaaaatttctaattgccctaaataagaactaatagcattatccaataaaaactcaacattctctggatcaactacactttcaccaggaactccaaacaactttacacgtaattcgctaattcttttcaaatcattcaattgtctttctgtcagtttcaaattgttaccctcactttctatcaatctgctcctacacctccgttacctcgccgaccgtacgctcttctcactcattccatttcgtttgccatcagttcacgcgccgtcgtgtcctttgagagtccactccgtcaccttaccttctgtctgcacttcacttcattcatgtcgctcccttaagtcgtctacttccggctccgtcgaatacacttaataaataagtgcccatttacacagttaactgccatgggtttcctttcagtcatacaacgttcacccaagtgaataataattacaactcatacgattacaaaagccgtttcctaattgttcagggacccatgcacggatattctaaatgagtaggtggcgggcaaacttcagccacaccaactacgcatttagtttatcgatgtgcatctcctaatcaataagactacattttcgaaacataaccgttacttcaactcaaacatattccctttttgattcaattgttgctgcgttacattttcaaacatcatactcaacatttgttgcatctttggcatttgttccaacataaccttttgattcacataattctctaaagctaaatgaactaaagtgcttttcggtacaccactttctttgctatactcgtccaaccaatcatttaactttttactgatacgtgtattaacacgaaccatttcactcatctaatcacctcttgtatatcgtactacataaatataacatcagtttaaacacaatatcaacactaagatacaccagaacaatgtaaaagtgggactctatccgctattaatataaacaagttaagaaaaacaaaaagagagcatcatattgacgaataacgttttttgacacttgggggtagtgcaaattcttaagttgatgggcatgtgaattaacccccagaatttaattttttcttctcctcccaaaactataaacttactatttgaagttccgattttcacttaaagcatttacatgtatcaccctctatttccaatatttataataatagtaatataaccgactataattgtatatattttacaatcaattcacctattacgatcatttgaatttcgatatataactataaaaaaagttattatgtctacataataactttttttcaccaatctactagcatagttctaaatatagaaaaatatcctaataatatttgaggaaaacatattcatataattttatttttgtatattaaaattatatataaatgctatactaagatgaatcaagaagcatccaagattctttgattaatcactacattttccttaaagcaaactcaacaagaaaagacactgtatagtgtcttttcttgttgagtttgctcctttaatcaatagtaagagaatatatatctataccttcttattgccgattggtattagaattgctgctcccacaagcagaatatctgaaagacactcatataagagtgtcttttctttatgtaaaaaattatttttaaacaaaaactctttataaaagaacacaggttcgtatataataagaacaaacgttcttttgatttaaggaggaatcacagtgtatgactattcaatcctaccgaatagaatcatcttatgtgttgatttacgtagcttttacgcttcagttagttgcattaaaatggggttagaccctatgcatacaaagttggctgtagtaggtgatgtgaacaggagcggatcaattttattagctgcaactccaccactgaaagcactgggcgtaaaaaagatggcaaggctttacgagattcctcgaagaaaagatattcttgttgtgaatccgattatgagtacttacataaaatgctctaattacataacggagttagctttacaatacgttccttatgaggatttccaccagtattccatagatgaatttctgttggacgttactgatagcattcatttatttgctaacgatccctatgaatttgctttgaaattcaaacgtgaaatatatgagcatacacgcattgaatgtaccatcggaattgctccgaaccctttaatgagtaaggttgctttagatattgaagcaaagaagaacaaagaaggtatcgcatattggaagtatgaagatgtcccaacaaaattatggagtatacgaccactcaataaattttggggcatttcgtacaaaacagaagaaaaattgaatcgaaaagggatacattctattggggatttagccaattaccctcttaaatacttaaaacaaagcttcggcaagattggggaggaattgcacttacatagcaacggcatcgacttcagccgtatttcggaaaaatacgtccctgctacaacttcaatcggaaaaagccaaattctaatgcgcgactatacaatagaagaattcccaattgttctattggaacatattgaagaagtctgttatcgccttagaagacaaaacaaacttgctcaaaccgttcaattctctgttggttatagcaagagttatacaggtggaattaggaaaacacatactttaaaccgtccaacaaatttaacaatggatatttatcatatctgtacatactttttgcatcaacaatatactggcgaacccattcgcagcataaacatatccttaacaaacttaattcaagaaggagaagaacaaatttctctttttgataatgtcacgaaacgagaacaagaagtgaagctaacaaaagtaatggatgaaatacgcacaaagtttgggaaaaacagtattttacgagggatttcctacacgcatagcgctacagctagacacagaaatacactaatagggggccacaaatcatgaataacgctaatatgccaaaaggaagaggaatggtgttaacaatagtataatatatgagtagagataacgtatacaacgataggtagttcttagagattggaacgattgaaacacataaaatcggggaacaaacttattcaacacaacgattacatcttgtgcaagaaccgacaccagcagagattattgttcgtagcttatctggtttagtaggttacgtgaaatcagaatttgacacaactgaacctgtaatgattcatattgtaaacccaacaacggtaagatgctttactgcggttaatggagataaggctagaagtacctatatcgaagcacaagcgtccattccacgttttaattttggaagtttttatgacagagaagaatttaatattgcattgcaatcaggttttgtacaaaacaatcatcgagacattgttttacaggtagtaggtacggttgtcgaaaatgatgttaaggaaattggagatgatggtgtatcgcaagctgtaacggtgaaaacaggagttgcgagtagagggaatgcaaaagtacctaatccagtgcaattaagcccatatcgaacatttgttgaagtagaacaacccgaaagtaagtttgtattcagaatgcgtgaaggggcacgttgtggtttgtttgaagccgatggtggggcttggaagttagaagcgatgaataacattaaagagtatttaaaagaagctttagcgcaagaaattgagtctgaaaaggtgtttgttttagcctaatggatattacaacggtagaaagtacaacgaatgtctgtatctttggattagggattgtgatacttgcgtatggagtttataaaggtggtactttcattgaacgaaagtttgatgaaagtgatcgcttagaaagggaggctttaaatgatgggaatagaaagccgagtccttccggaacatctagaaaaggctttggaattagaagaggagcgtagagagtgtatacaaaatctgcatctgttatataaacaaatgaaccaggcaaataaggaaaggaataaaactttgtatcttgaattacataacgcttatcagaagcaaggtataagagatttagagatttcaaaacagttatcagctatgtattttaagaaacagaaaagtgatcgtgaagcagaaagagcagaggtttttcgtgtagcagatcgtcttgaaaaagttggtggcagaaaagaagtagttgaaagaattcgcaagaaagcataagagaagaacccgctgcaacgggtcctaaagaaaaaataataatacgtattataacaattaataaatgttttgaaaataggagaggtaggaaatatgggtatttttcgagtgaaaaaggatacgaattattcggtgatacacaatacgcctttgcgcgatgagaacttaagttggagggcgaagggattattagcctacatgctttctttaccggacgattggacatttcatgctactgaattaagtcaacatgccaaggatagcgagaaaacaacaacaagcaccttaaaagaattgaaaaaggcagggtatttgaagagatatccaatccaaaattcagaaacaggaaaaatttcacattgggaaaccattgtttatgaattaccaaccatagataccaaaaaccatagggtggataaaccacctagtggtgaaaccactgagtggaaaagccatcctatggatgaaccacatgatggtgaaaccaccgagtggacgaaccaccctatggaaaaatgccgactactaaatactaattctttactaagtactaataatatacaaaatactaattattatcatgatgataataaagaatcaaaatcacatgtattagtcgatgaagaatttaaagtcagttataactttttaaaaggtgaaggaattccgttaagtgaaattgccattacggaattaggagagttttgtgattcgtttggtagcgaattaattaaacatgctgctcacaaagccattgatgaaaataaaccaaaatggaattatattaaggctattttgaaaagctgggaaaagcaaaaagtaaaaacattagatgatgttgctgcattagatagacgctttgaaatgagtaagaaaattaccggtacagaggtgactacgatggggctatagctcagctgggagagcgcctgccttgcacgcaggaggtctgcggttcgatcccgcatagctccaccatcttttactgcgaacacaagaaaacttcagagtgaacctgaaaaggtgcactgcgaagttttgctctttaaaaatctggatcaagctgaaaattgaaacgacacacagctcatgtgtgttcgagtctctcaaattttcgcaatcagaagtgaaacatcttcgggttgtgaggttaagcgactaagcgtacacggtggatgccctggcagtcagaggcgatgaaggacgtgctaatctgcgaaaagcgccggcgaggtgatatgaacccttgacccggcgatgtccgaatggggaaacccagtgcaattcgttgcactatcgttaactgaatacataggttaacgaggcgaaccgggggaactgaaacatctaagtaccccgaggaaaagaaatcaaccgagattcccccagtagcggcgagcgaacggggagcagcccggagtctgaatcagcttgtgtgttagtggaacggtctggaaagtccgacggtacagggtgatagtcccgtacacgaaaatgcacatgctgtgaactcgaagagtagggcgggacacgtggtatcctgtctgaatatggggggaccatcctccaaggctaaatactcctgactgaccgatagtgaaccagtaccgtgagggaaaggcgaaaagaaccccggcgaggggagtgaaaaagaacctgaaaccgtgtacgtacaagcagtgggagcctctttatggggtgactgcgtaccttttgtataatgggtcagcgacttatattctgtagcaaggttaaccgtataggggagccgaagggaaaccgagtcttaactgggcgttaagttgcagggtatagacccgaaacccggtgatctagccatgggcaggttgaaggttgggtaacactaactggaggaccgaaccgactaatgttgaaaaattagcggatgacctgtggctgggggtgaaaggccaatcaaaccgggagatagctggttctccccgaaagctatttaggtagcgcctcgtgaactcatcttcgggggtagagcactgtttcggctagggggccatcccggcttaccaacccgatgcaaactacgaataccgaagaatgttatcacgggagacacacggcgggtgctaacgtccgtcgtgaagagggaaacaacccagaccgccagctaaggtcccaaagtcatggttaagtgggaaacgatgtgggaaggcacagacagccaggatgttggcttagaagcagccatcatttaaagaaagcgtaatagctcactggtcgagtcggcctgcgcggaagatgtaacggggctaaaccatgcaccgaagctgcggcagcgacgcttatgcgttgttgggtaggggagcgttctgtaagccgttgaaggtgtgctgtgaggcatgctggaggtatcagaagtgcgaatgctgacataagtaacgataaagcgggtgaaaagcccgctcgccggaagaccaagggttcctgtccaacgttaatcggggcagggtgagtcgacccctaaggcgaggccgaaaggcgtagtcgatgggaaacaggttaatattcctgtacttggtgttactgcgaaggggggacggagaaggctatgtcagccgggcgacggttgtcccggtttaagcatgtaggcggaggttccaggtaaatccggtaccttgttaacgctgaggtgtgatgacgaggcactacggtgctgaagtgataaatgccctgcttccaggaaaagcctctaagcatcaggtaacacgaaatcgtaccccaaaccgacacaggtggtcaggtagagaataccaaggcgcttgagagaactcgggtgaaggaactaggcaaaatggtgccgtaacttcgggagaaggcacgctgatatgtaggtgaagtccctgcggacggagctgaaatcagtcgaagataccggcttttcttcttcctcttcttcctcttcctcaacctcttcgatctcttcctctccttcctcttcaactttctttttagcgaagaattgtccgtctccaaatcgtaatagaaagggattttcttcaattgcttttaacatgtctgtcatttcgttttacctccttatcccattttggtttgtggaatgtttctatattttgttttaaccattcctttgtagtactagaaaaacgctctcctctttcaaccacttttaatattttagaaacttcttccttactacaattacttaaagctaaagtgattattgtttgatattcagctaattcccaacagattgcatcagacaattcttgacttgttttgaattctttatcatgaactttcacttcttacaccccttttgtttttctaaatacagtgtataacactatcgcaaaacacaatatatagtatgacgtgacacattgtgacaataaaacacaaataaaaaaagaccaacctaaaaggtcagtccgaaaattaaatgatgtttttctttctattactatttgatatttcattatgtaaaatagttaaaatgtccatgattgcatcttcgcttatcgtccgtttattatcataaatattttctctaacatctcttatcaattcaggcatattacgcaaatgaatgtttcttctcacttgtctatctaattccaaataccccttttcttccaaactccttatacaatacctcacagtactacgagaataaaatgtttcttcttctaattctgttaaagaaggactatacccatgtttgatttgaaaattttcaatagcattaaaaatagttttttctgtatcgttcatcatactttattcccctctactatgatttttttaattaactataaaaaacggtatctttatcaactggactttgcctctctcttataagttcaatagcttctgattctgtcaacccattgatgtacatttcccttacaacaaaaaaaccaggttttccgcttgggcttgcacccatgattttattaatgcgtttaatatcattaatcatatactttggtggcactttgcctttcccaatgatctgtttaaattcttctgacctacttatgatatctattgtgtcgttttttaataaacgctttgccccacttaaaccgtctgtttttaagacatcagccaaaatccccctttctctttttgaaagttcgcctgcatatctacctttaaaagcttttctctctcttctttctgcgttaataaatttattgatttctttttttgtcaaacttttattaccatcaaaaactttttcgactaaagaggcgtcgcctttgtatttaaataacatttcttctaatcgtactttatcgaattccccgtttttacgttttgaaatctttttggaaaatttaatatcaaaacctaactctcttatcgtcttataaagtgtctttttcttcttcttcatacaatcacctcattaatgtttctctctttctctctttgaataagaaacaatagtgtctgaaccttcacactccggacaacacaaaaaataattatgttttctaggattataattaattattttttcgttgatacacccacaatctttacaaataattttttgtttgtattgtatgtatggatatattttagccatgtctaactatcctcatatttctgttgcattgttttataaaagaaatcatgcaactcaataaatagcttgtcatcagctttctcaaagtaatcaatcaattttataagtgtttcagaagcgttttttgattccaatctttgtgacactttatcaaatcttttttttgctctagcgtccactgatatagttgttagctttttcaatttcaaaactcccttccataatgtactaaattacatatattaattttaattcatttttaattaaaagacaacacaatatgtcacaaaaatgagaataataggatgtgaccactcgcatggtagttatacaataaggaaatatttgatgttttacgtacagatgtagttattaaatctgagttaggtggagaatttatatatcaatttgttaaaggaaatgacaaaacagatatatggattacattttcagagttaaatagttctcctgggctatatgcagagaatgaggaaaaaaccactaacgttatgtatcaggttgatatatggtcaatggcaccaatcaaaacgcaattaaaaagtgcagttcaggcagctatgaaaaagctgtcttttcagcgtttaagcacttatccagattatgaaatggatacaaaaatttatcgatatggttttcgttttgtaacggaaattattaattaaggaggaaaatgaaatatggcaatgacaatagattttagagatttacattatgcggttttaactgaaacatcagatggtaaatttaattattctacaccaaaacgaatcggtaaaacagttagtggtaaagcgtcacctaaagcggaatcagtaactttttatgctgaaggtggaccagcagcaacagctagtgcatttggcggtacagaaattgaattagaagttgatacattacctttatccgtttatgccgaattgttaggtaaaaaggttgtaaaaggtcaagttgtagataatacaagtgatgttcctccttatgtagcattgctatatcgtttaccatacgacaacggaaaaaatctatatgtatgttattacaaaatgaagtttgagcttccaagtgatgaacataaaacagcagaagataaaccaacattccaaagcgcaaaaattaaaggtaaggcaattcaacgttcggacggtaattggagacatcgattagatgaagaggaagaaggacacgatgcagcagttgcggcaaagtggtttaaagaagtaccagctccaccaatagaaacagccccaccaagtgggaagtaattaagaaaagggatggcgaaatgccatccttatttttattaaggaggaaacagatgatgaaaatcacattacaaaatacagaaggtaaaaaagatttttatttaccacaatttatcccaggttcagctacttttgaagcttcaacattagctgatgaattacaagcggacttagtaccaaaagaaacaattgaaagagctgctaattttgttgccagtgtgtacggaaatcaatttacagcacaggaatttgtggatggcactcatgtatggtttttaagtcttacaattcattctgtttgtttaacaattatggggcgcctaaatgatgcgattaaggtaatggaaacggtagaagatgcgaaaaaaaagttaatggcacaactagaaatgaaaccgacggaggaaaaatcaaatatagcgacgctgtaattgatatttataacatattgatggatgcaggtatgacacaaaatcaaatcaatgaaatggatattgcgttttactttacctgtttagcgagaaaacaaaaagcaaatcgagtgacaacagcagataaagtaccaatgtggttgtaaaggtaggtgagaatttgaatggcactaggagataatacaattggtggtcgtgtccgtttggatacagatcaattcgaaaatgggattgcaggcattaatagaagtctgaaaagaatagacgctgaatttcgtaacacgtctgagcagttacgtggagttggttcagagatggatcaactggagaataaggcaaaccatttaaatcaaaaaatagaagctcagacgcaaaaaatgaagcattatgagcaagctttgagaacttcacaacaaaaacaacaagaaatgcgtcaaaaatgtgagcaattggctacatctatgcaacaattagaacaagagatacagcaaagtactcaggcatacgggaaaaatgctcaagaaacaaaagatttgcaagctcaatataatcaattacagcaagaatacaaacaaggcacacaagctttacaaagattaacttcatttgtttgttttgtggtataagattgtacgttgttcttcttagatttaaagcgcggtgcgctgttttgttttttgaaaaagcgtgtataagcatccgcaaggttgcgaacagacgactgaatcgcaatactatccacttcttttagccaaacaagctctttcttcatggcaggtagtttggcagagcatgtaccataggtcaagccttttcctgtctctttgtatgcttgatcccataaggataggaaatgattgaatacaaagcgagaacacccaatcgttttgttgattagaattgcttgtgcctgatttggatagatacgaaacttataggctttattcatcattatttgattcacctccatttcggtatatgactattatacaccaaacgtacattcgataggtagtggagtaacactttctgtatgtcgaacaattaagatggcttcctgccatcccttgttcgaagccaattcatctcccacctactcactgggctgtgacccttcacgctccttgaggaaggagtcttcttggctaaaataataaataaaaaaagaggatcgccccatactagagcagatcctctctttcacttcacatacacataggcttcgtttgctgctatataatatgttttacctttactattgtgcactctatattgtggtgaattatttacaattacctttgtatcaataatgaatcctaaacccatatctacagtaccggcaacatctttatcctgccaagatggagaatcatagaaacgtaaattatttacttttgaaataactcttttaccaattactgtagcaggctcattaccttggtaacgaatatatgaagaatcataataaatccattgattaccaccaagatgtaaccagtttcctaatttaccccatactttataagcctcacctttttgtagcttacgaataatactattttctgttgatggtccaaagcggagatttacattgtatccttcaatatatgcaataccattcgactctactgtaccagatatttcatttgttgtttgtggtttggtatccactgtaaccgtgctccctttataaacctttaacacgtctgctcggaacttagcctcagatacgccatgactacgaagataatctattggatcttcatggtctgtcccacctaatttatacgtaatatccctatgtgtccataatcctttagagggatgaatatttcgttctcgcaagatttccccaattaattctatatatttttcatatgaacgtttaaatttcaatggatcacttgtctcacacaattccacatgaacaaatctagcatttgctgctggacctgccccccatgcctgatgttttgtagatgcaatttgaatcttctcatcccaatccactgcgtagtgaacaaacgctgaacgccatgtacgagactcatacttttgaatattaattgctggcgcctctggggtagctgtagaatgtgctacaacaccttcataagctccaacaccataacggtatggttgttttggtaaatcaggaataaatagaattctatcagcaaatacatttgtttcaattgataatactaaaataatagcaacaactatggataaaatatgcttgtatttctttttcattttctatcggcatccctttttataatttttgtatggtcaaataatccactagctgacaatccgataatcattccttgaaatagattcattttaatatcttgagacaaaaataaaacacctagcgtaatgccaagtgttaaattaaataacggaatatattttgtttgcagtccagttgtttttgcaatttgtgaaatccctacaacaaccccaatcattgctgtaatttcaatcattacatacctcctcctcgtatgataaagttaggttttttaggaaagggatttacctataaacccgtgatcttgcaatcgattttaaaaaatcaagcatctggaatagatgaagatgaaaaacgtctaaatgatgttttagagcaagtaagacattttaaacaagtagaatcggatggaataataactgtatcagttccctcaatccctacatggattgctggaggtgtaatgataggggtagcaagaaataatttaagtacgctggaaccgctattagcgcaattgcgccaaacggtagactataaaattacattgaatcgtgtagttggagttgcgtataataatattgctgaaatgcaaaatgcaattggatcagctattaatgctctcacctatatgtcagcacaatggcatgatttagattctcaatattcaggagtacttaatcatattgataaagcatcccaaaaagcagatcaaaataaatttaaattcttaaaacctaacctgaatgcagcgaaagatagttggaaaacattaagagcagatgcgtttacattaaaagaaggaataaaaacattaaaaatggatcctgtttcttcaaagaaataggaaagtatggttttattgttaagttttctaaaatatagagattttaaaaacatactgttaaataattaaatgattcgttatatatagaaaaggtggagttgtattaaggactctaccttttttgatgatatgcttctaatgagctaaaactttttgttcatttatttacaagaaggtgagattatggtgtatgtcattccatacgacagattcgctagggatgatattagttatttcttagcaaagcattacgaggaaattggttaatgcgttttggtgatgataatgaggagctcgatgcatttaaacagtgtatcttcattgggcgtaagcgtgctgctaagaaaaatgatacatactttaacgatacgctaccctatatcgatcaagctaagataaacggaaattttgtgttttttatagtatcaggtccatttttgttgttttgggggcacttcaaaatgttagctttatgggcatgaggctgtaaccaaaacacacggttagttagatggttgttcatctgaattttctattaaattaatctcaagtttatgaagatatcaagatttaatgttgtgtgatagtatagaagggaaaaaatatagataaatttggaaaaggaggatgcaaattggatgttcaaactactataaataataaagttactgaactgttaaatgcctggtatattgaaattcgaaatagaaatgttgcgaatgcatataaataaaaaaagaaattgagagttctatagaaaatattgaagaagaccaaaatctattactgtattattcattacttgattttggttataaatatttaatagataatttgagtgtagctaaaaatagttttgatcaaattgaatcttttaataaaccaactgacgatttcttatcgtattattatcatttttataaagcaatctactctaatgcagttggtgactacaatgcagccaaagagcattatgaaatagcagaaaattcacttaaaaatattccggatgaaattgaaaaggcagagttttattataaccaagctgtgttccaatatcattactatcaggcttttgtggctttccaacaagcaacaaaagcaaaagaaatatttactgaacacaatgggtaggaagtgaaaatcggttattgtaataaccttatggcgttagcttgtacgtatttgaaagaatgggaattagctgaagaactttatatcttttgagcgttttccgtgtgcatcaagtgagtatattgttaattttatctgtattcattttttattatgaaacattttaaggttgataaagttttattgtgtgggattattaaataaaaatgataaattgtaaatgtcaagataaacatgtacattttcgcttgtttaagcatgtacaaaatccaagcagctcaccccataaacttcatcaaaagggttatgagacctatcaaatggcagacactttcatcggaaactctctgcacttttcaggggaaggactttccagtcccagtaaagccccagtacaccatagagatattcgttactccatctctgccatccgatgctacgctttcgtcgtcgtttccttctcgttaacagtgtgcgaattttcatctccgtataatcacgtacttcactgaaagcttgactagagttcccaacccggaagtagttcacccatccagtcagtacggcattgatttgttttattaagtcttgtgctggcttcgctcctgcgttttgaatgagttcgcgaatttttgctttcactgtcgtgcgagctttcttcttcgggatcatgaaaacgaagaatccattcttatttcggttcggtattcgtctcaggtcaaatcctaaaaatccgaaggattctccttttaggacattgaccatctgagtcttctccagattcagttcaactcccaaaggctttaactgttcccacagtcgtcgtaatgccagttcagcccatccacttttactggagtgtccgcttacagcgataactatatcgtcggcaaaacggtgatagtttacagcttcgtaattgccatcagctgttttacgtcgaatggtatcaaatgtccaatccacttcattgaggtaaatgttcgcggctagtggagaaaatggtcccccttgcgggacaccgatctttcctgttgccttaattacctgttttacaagatgcataacctgtgggtcttggacacgtttcgcgattttctccaataatatgttgtgtcggattgtatcaaagtagcgtgacaaatcaacatcaattattatggtcatacggcgcaatatactgcgtcgtacttctgccaatgcctgatgtggagagcgtttcggccgaaacccatacgagtttggacagaaatcagcttcaaaaattgcttctaatatgagttttagcgctccttgtactacacgatctcgtatacacggaatttgcagagttcgcattttgccgtttgtctttgggatttctacttttcgattggcttgtggttggtatattccagcttgtaattcttcttgaatacccgttaagaatgggataactccttctagttctatatcagcaaaactttttccatcaatgcctggggcaccattgtttttcctcgcctgttgatatgcttcgtgaagggttgtaattttggtaatgtgggtaaatatcccccaaaaccggtgcgtaggttcagacttcgcctttcgatagattcgttgccttagttcctgcaaagtgatgggtgtttttgtcatagcacccttgcctcctttagtcatacgaaatgtttacaggttcggatcctttcctccccgcgtgttttgctgcacgcagatctctggtactacgatccgttccgccaccctgacacctaccgttctcacttcccgatcgcggttatagagacggtctcctcgatgagatttcttcatcgggtgtcgagggcttctccagtttccacattatctttctctccatgtcgccgctgataccccgccggtgagaactgccgttccagactcgtttcggtcagttcttgttgctttcgcacgttatcgaccgtctcagccaccggaattgcgtgtaacgaggctacatctacgttcactgtacgttacaacctggagatttgcccacatgccttttgcatgtgatgtcagagggcttcgccatgtcgctttcacttcatggcgcctctcaggctacgggagtggagtctattctcccgattggactttcaccaactagataatgtgtccttatctggacacgccaattagagcaaatgggtttacgtggagaaaagattgaagataaagcccttgcagcaggtggcgagcctattcgaaaagctatttctgaaatagccccaaggagtgatagccctaaaaaagcaacaaaaagcgagccgtggcgaacaggacaacatttggctgataatatacgggttacaaaagcaaaaatggagggcggcataaaaacaatcaaaattggtatagataaagcggatcgttccccctatttctatggaaagttcttagaatggggaacttctaaaatgccagcagagccatttatagaacctggatttaattcttcaaaagaagcggcaattcgtgctatgacagacatcttgaagaatgaaatgaggttgaatgtatgataaatttacgacctgaaatcgtgcaagctcttgaaaataatcaggagcttgtttttttattgggtggaaaacgtgtttattatcgtaaagctaaaaatgctgaagagtttccgcgtattacgtttttcgaactagacaatagaccagatcgttttgcagataacgaggaaagcgaaagcgaaattacatttcaaatcgatatttggtcaaaaggcagtacaacagcaatccataaaaaagtgaatgaaatcatgaaaagtattggtttttcacgctatgcggttgctgatttatatgaagatgatacacaaatttttcattacgcgatgcgattcgtgaaaggagtggagttatagatggctggagaagttattaaaattagttcgactgtcggtgtagatagtcttgtttatgcgaaatcggtgaaagacgatgcaactggagtggattatgcaaccgttaagaagttagaaggtgctgtaaaagttaaaacttctaaaaaggtgtcttctgaaattatgtggagtgataataaaaagtcagaaatcgctgagtctgatggtgaagttgaagttgaaattgaggttcgaggtcttccattatccacaaaagctgatattgaagggtatccagaagttacagacggtgtattagatgaaaaacgtgagggcgaaaaaccgtatgtagcaatcggatggcgctttttgaaggcaaatggtaaatatcgatacgtttggttgttaaaagggaagctttcacaagaagaggaagaagctgaaactaaaaaggataaaccgaacttccaaactacgaaacttaaaggttctttcattgaacgtgattttgataacagatcgaagtttacagcggatgaagatgaacctacatttacaaaatctgttggagataactggttcaaaaaggtatatgaaaaaccagtaacaccaccaacaggaaagtagggggagcaaaagctctctctcttttttattaacgaggaggaaaagccatgaaattaacactaataatcaaggaagaaaagaaaaattttcatttaccggagtttattccagcacgtttaattcgtcaagcacctgaacttgctgatattccaaataatccaggtcctgaggatatggataaaatggttcaatatgtagtaaaagtttacggggaacaatttacattagatcaatattgggacggtgtggatgctcgtaaatttttatccacaacttccgatgtaattaatgcgatcatcaatgaaactgtgggagcggctggtggcacaccaggaactggagaagaaacaaacccaaacgcgtagagggaggggggctaacgttcagtgagtttatggacgagctctacctctctttattacgtcaggggtataaacacatgcccatcaacttaagaatttgcactacccccaagtgtcaaaaaacgttattcacaaatgtgtagcatcctagcccgagagggctggggtagctactaacccttacgggtcgcgataggtaaagctttgaagttatctctactttttcccccgccccacaccgtgcgtgcgactttcaccgcacacggcgttccatcggttcagattgataacccctaacaaatttagttagtatcatccttattctttgcctcgcgattaagataaggtgaacaatgagatatatttcaaatgtgtagcagctcacggtatttctttagtttcggtagtttgtataagatactgtcttctaagtccttttgatgtataagcttatggcatcttatgcacagggtggcaagattgctgagtttgttgattttctctaaaggtagtcgattattaacatgatggcaatgtatgttagttggaatcaaccctgtcttacatattcggcactttcctttgtcacgattatatgcataatcgcgattaagtatatattcaaagttatagagtcgtttatttttagtttgtctaagcatctgatacaagaccatttggttgatttggtcgttcgaataaatggttggtctcattttcttatcgaccttaccatgtcttctcgaataaattgtccttcctatctgtgtatagggggtcgtatcataattgtataggagtgctttagtactaggtgtaaaactcattttggttaatcctatcttaactccatcaacttcaacgaagggtactttggttttatgccctttatgcctatctttacgattatcaagattttcagctggagtaagcattttttcgaatactcctccaccatgtttgttcttaatagacttgtagaatgtatagcgtattttgtcatcgcatctaacgaaaattctagcagaatttcctatacggaaataattactaataccaataattttggtgttaataagttctatttgggcggcaacatcgtgagagctggttgttttccgaacattgtaggtatctcgaaggatttctctcattttagagtttaatttctttttgttcggtatagcttttcctgcaatacggtttttcagtctcatcttttcagctctgatgtcgaatcctaggaattgggctggcttctctctcatatcggtaataaatgttttctcctttgataattctaatttgagtatatgtttgtaatacttattgattttagtcaagagtgttcttgcctgtactttatcctcgcatagaattatccagtcgtcagcgtatctaacaagaaaacatttcttatgttttctaactacttttctaagtcctgtactgaaagcgtgtttaacagtataacgcgcgtagtgttcttcgaactctttagctatcatccagtcaaagttatttaagtatatgttagctagcaggggagatataattccaccttgtggagttcccaactccgtagggaaaagttgattatcttctagtacacctgcttttaacattttcttaataatggttaggaatctcttatcctttatgcccatattccacattatttcaacaagtttattatggttaatatggtcaaagaaacttttgatgtcaccttcgatggctacgtatgtttttgacctagaaatggtattcaagattctgcctattgcatagtgacatgaacgatagggacgaaaaccgtaactatggttgaaaaacttcgcctccgctatgggttctaacaccattcttgctgtttcttggattatcctatctatcatggctgggattcctcctcgtatattaatatttaagtcctatttcagacttagattttttctttaataagagtcctgtaataaataaaatacttggacgtctcaagatatttctagataatggtcttaggatcatttgggacaattcttaccgctcctgtggacttaccacataattaagagtgtttctcagtgaacgtgcgggactccctactcgcaggctgagcagcctgaccctcgaacctagatgatagtagctctagggcggctttcgattcaggacaagctctcatacacgaggttgttggtcggcgtacacactagagatatctcgagacgtccaagcaatgattctaaatagaagggaggtctcttacatgagattatttgttggtttagatgtaagttcgtttgatataaaagcttgtattttaaatggtgaagggaaaaagctagattccttttcggtcaacaacgacttgccaggtgccacagcgctcaaagagcgagtgttacagtgtatagccaaccaagaaattgaaacttttaaaatcggtctagaatccacatctgtttatagttttcatccatctatgtttcttcattatgatgaagacttacaacggtttggggcaaaggtatttctgatgaatccaaaacaaattgcaaatttcaagaaaagctattctgacatggataaaacagatgagattgatgcctttgtcatcgctgattacttacgatttggacggaatcaaatgtccatcgtaaaagaaagtcagtatgtggcactccagcaattaacaagatctcgttatcagctcgttagaatgttgacaaaggaaaaacaacattttctccaacacctaagttataaatgtaatacgttctcacaagaagtggattcttctatctttggcaacgccatgatggaactatttcttgagaaattcagtctagaagagctagccgacatgcctttagaggaactcgctgagttcctacaaacgaaagggaaaaatcgattcggtgacccgaaatgtgtcgcatcaaccattcaaagggctgttcgctcttcctatcgtttggataaggtcgtagaagactcaatcgatgttcttctaggaacatcaattgcggtgattcgtacctatcaacagcaaatcaaagaactagaaaaatccattaagcgaatcatggctggattaacgcaaacacttgagtccattcctggaattggtcctgtattcgccgccggtattatcgctgagattggtcaaatcgaaagatttgatgatgaaaccaaggtagcaaaatatgccggattatattggcgtacgcaccagtctggtcgattcaccgcagaaaacacttcgttatcccgtaatggaaatcattacttgcggtattacttagttgaagccgccaactctgtaagaaggcatgtatctgattatcaagaatattacgtaaaaaaatataatgaagtaccaaaacatcaacacaaacgtgcactcgttctaaccgcaagaaaacttgtgcgattggtggatgcgctactacgtagtcaccaactctttacgccagaaaggtgcgtgaaagtgtgacataaaacttgtcatcgctacctttcaattattttccagtaaattacatatattactggtttagtttcgtgatgtcttttttaagcaaataggcctttgataactttaaacgtttatattttttagttgacatattaccgcaggtctaccccttgctttccctaattatacaagaaatcgttataaaaacaaattatgaaaaaagactattacgtttatcccgctatccttgaaaagtcttcagatggttacggtatttactttccagaccttcctggttgcgtttctcatgcagatacacaagaagacgctttaaaggaaggtagagaagcattaggacttcacttatatggtatggaaaaggataatgaatcaattcccgaaccgacaccaattgataaattagaattagatacagacgaaaattcttttttaattgatgtttggatgccaccacttagaaataaagacaaaacaacttataaaagaaaaaatgtaactcttccttcttggttagaagaatacgcaactcataaaggcgttaatttttccgagatccttgtagaaggtttggaaatgcatttgggcattaaagataaaaagaatacaccataaaggacgccatgagcgtcctcttttttatataagctatttgtttactcatattcatttttttattcttctttgaaccgacactatagataggcacgtatcagctcaaagaagagcaaaagctctccttatggaccgtttaattattttgtattcctgcataatcacaattagattctaaagttctctttgtaattatttacttgccctataaacgccagttcattcaaacagacatccataaagctttattcggtaaccaacccattaaaattttacagttactattaaaaatagaaaagagcaaccatgcaccagtcgctcttacgtaaaattctatgctattactataattcattttttcaatagataccatatgtaaaacttactgtaagaaaagtgtaagttcctcagcaagctttatccttctagaaatttcagcatgcttctgatatacataactactactatagcctaattccctagctatagattctaatgtttttcgttgcacatacttaccaaatagaattttattttctagtccttcaaacttaccaattaatattttgaggtcgtactgatcgttcatcttattcgctagttcatattctatagccgctatgtgttcctctattttcgcaccatctgaatcagcagttaacttatactttgataaatcaccaacactccaacgcattaattctcttttacttctatgcaatttattttctaaataaataatttcatcttccaactttttataatctttaaaccattcaaacaagggttggctcacctgcttcctctttcaccatgtaaactcatttcttcatgttacgtttatttaactgttttcttaaatgcccgtaactcacattaaactttttagcaatttcaatatatttcattccatgttctttaagtttcatggtatcttcacaaattttattccattcgtcttctgttctttgtatggatgttttaacaaaaactttaccacccaaaacaacccctatttcattcaatctcttccctacttcacactttgtccaacaatacacaaaatcacgagaacatttattgtcacactgacggcaatgattatctgttaatcctagtatttccaccctcgcttcttttggactcatatagtaaccattcctaacttatctacatgatataaataatcaacaggtgctctattagtttgtggtactatatacgctcttttctcaaattcctctcttggaatagactttcttcctccttcatttgtttgttttgtggtataagattgtacgttgttcttcttagatttaaagtgcggtgcgctgttttgttttttgaaaaagcgtgtatacgcatccgcaaggttgcgaacagacgactgaatcgcaatactatccacttcttttagccaaacaaattctttcttcatggcaggaagtttggcagagcatgtaccatatgttaaacctttcccagtttctttatatgcgtgatcccatagggataggaaatgattgaatacaaagcgagaacaacctatcgttttgttaattagaattgcttgtgcttgatttggatagatacgaaacttataggctttattaattatcatttgattcacttccatttcggtatatgactattatataccaaacgtacattcgatggatagtgaagtaacactttatgtatgtcgaacaattaagatggcttcttgccatcccttgttcgaagccaattcatctcccacctactcacttcgcgttccttgaggaaggagtcttcttggctaaaatgataaaagccttcctaattataggaaggcaacgttctaaaatgaaaacctatatttgattactaattaaattacctcaaactgataatatacacttttcccattctccctagttactttaatttcagcaaatcctttaccaatgacatccattctaacctttccattgccctgtactgtatatttgacaactttttctccatctattgttgtatgctttgctgcaactccatcttctgttctagattgaccaacacgccaacagtcactgcacttttttgtgctcttagatatcatttcattttttacatgtacgctgttagtagatgcatcagcaataccatttgtactcaacaaaattatggaagttactaaacctattcccagtttctttaacattatttcatccctcctgtgataattcataattttatattaaactgagattctttcaggtaactttcatttaccttacaataaccttaaatccctttctgtagatatcgaattctttggaagaaagaattcacattgtttatattgattttttaaacatggccatgtggattgcccctacattattagctatatgtacctttcagttcattttctgctattagttcatgtgttaaatagatcaaatacataatgactgagagaattagataactagcagttttacctttatcagcaattaaatgccttgcttcgactagaatcacttttattattaacaaaatctcactagctcaaatgtaataacttatgagtataagaatattttctgagctttaatataatgtaaaattagtaagaaacttatttcatgaaaaaatgttaactattaaagaattagaagtgattatatgaataaattattactatcgtgtttattagctatattctgtctaaatatcgcaggatgttctaatgatatgactatactaaaggatagttctaaaccttcaacacctacgaaggcgaaatgcattaacaaagcttggtacaaaaaacctatgccatgtaataggttatgctaaagatcataaggcgaatatgaatgtatatagtaaacaacatataaaaacattgtaattaattgttgtaaatctacctaaaaagactatcaataatgaagtgcaccccaattgttagacacataactaacaattggaggtgcattttttacctcgtatagtatgtttaaacttaatttttttactttcatgagagacctgtaaaataactcttggacgtctcaagatatttctagataatggtcttaggatcatttgggacaattcttaccgctcctgtggacttaccacataattaagagtgtttctcagtgaacgtgcgggactccctactcgcaggctgagcagcctgaccctcgaacctagatgttagtagctctagggcggctttcgattcaggactagctctcatacacgaggttgttggtcggcgtgcacactagagatatctcgagacgtccgaggaatgattctaaatagaagggaggtctcttacatgagattatttgttggtttagatgtaagttcgtttgatataaaagcttgtattttaaatggtgaagggaaaaagctagattccttttcggtcaacaacgacttgccaggtgccacagcgctcaaagagcgagtgttacagtgtatagccaaccaagaaattgaaacttttaaaatcggtctagaatccacatctgtttatagttttcatccatctatgtttcttcattatgatgaagacttacaacggtttggggcaaaggtatttctgatgaatccaaaacaaattgcaaatttcaagaaaagctattctgacatggataaaacagatgagattgatgcctttgtcatcgctgattacttacgatttggacggaatcaaatgtccatcgtaaaagaaagtcagtatgtggcactccagcaattaacaagatctcgttatcagctcgttagaatgttgacaaaggaaaaacaacattttctccaacacctaagttataaatgtaatacgttctcacaagaagtggattcttctatctttggcaacgccatgatggaactgtttcttgaaaaattcagtctagaagaattagctgacatgcctttagaggaactcgctgagttcctacaaaagaaagggaaaaaccgattcggtgacccaaaatgtatcgcatcgaccattcaaaaggctgttcgctcttcctatcgtttggataaggtcgtagaagactcaatcgatgttcttctaggaacatcaattgcggtgattcgtacctatcaacagcaaatcaaagaactagaaaaatccattaagcgaatcatggctggattaacgcaaacacttgagtccattcctggaattggtcctgtattcgccgccggtattatcgctgagattggtcaaatcgaaagatttgatgatgaaaccaaggtagcaaaatatgccggattatattggcgtacgcaccagtctggtcgattcaccgcagaaaacacttcgttatcccgtaatggaaatcattacttgcggtattacttagttgaagccgccaactcagtaagaaggcacgtatctgattatcaagaatattacgtaaaaaaatataatgaagtaccaaaacatcaacacaaacgtgcactcgttctaaccgcaagaaaacttgtgcgattggtggatgcgctactacgtagtcaccaactctttacgccagaaaggtgcgtgaaagtgtgacataaaacttgtcatcgctacctttcaattaatttccagtaaattacatacgttactggtttagtttcgtgatgtctttttttagtaaataggcctttgataactaaaaattcttttgtttttcagttgacatactaccgcaggtcttaaataacctaaatctcggatacataaatcatttgctgtcacagttggggcacacaaagagccgtaagtgcgatcatgttgtttacctggacctgtatgaatatgaaggaactgtccacttaacaaatcatactcaagttgaatttttatcccagctgtatggctacatcctcctgcacctggataaaccgatgaaaatacatcagggagttgaaatgcagttgaatctaaaatacgaatacgcttaaaaacagaagtatatggagaagaaatcggtatagatgaggtcaattttcggcttagtagttcagctagtatgtgttgtagaaattggacggctgctttattaaatcgttggttcagtccctcgggactgatgagcacttctgtcgaggcttctaaacagctagataactgagttaaagacgtcgtagcgatattttggttcatccatacacataaagcgactaaatcttttgcttggtacttactggttcgttgtacgaaaccaacatctcgagcaagattccgtaaggtatttggagataaaaaacgttgaatctcttgagcaaatagttgtaattcatcagaaacagacataaaaaacgccatcctttcctatgattctacagaaagaatagcgtttttttctctttatggatacatttttttagctcgatagcgatgtggtgttacctcaaatataattattttatttgaaggtcccttttaaatttttattaaatcttttcataggttgatatacaaggacgtgtaatgataaacctatcactgcagtaatgttcaaaataatacttataatcattaaagaccattctataactggagaaaagtatccgttcgtgcttaatgtagaagaactgatacctagtagtaaaatcactattagtaaaggtaagtttttaaccaatttgaatcccccttttaaatataatatctttatattattatatcacactggattatgtaattaatataagatagttatctatgagaatttaacatattttctctttttgggggtgacctacttctttagcttgatagcgatgtggcggtaccccatgcccatcaacttaagaatttgcactacccccaagtgtcaaaaaacgttattctttctaaaaagctagctagaaaggatgacattttttatgaatctttcaattcaagatgaattacaactattttctgaagagctgtatcgtcatttaaccccttctcttttggaagaactcgctaaagaattaggttttgtaaaaagaaaacgaaagttttcaggaaatgaattagctaccatatgtatctgggtcagtcaacgtacagcgagtgattctctcgttcgactatgcagtcaattacacgccgccacaggcactcttatgagtccagaaggactcaataaacgctttgataaaaaagcggttgaatttttgaaatatattttttctgcattatggaaaagtaaactttgtaaaacatcagccatttcaagtgcagcactcacgtattttcaacgaatccgtattttagatgcgacgattttccaagtaccgaaacatttagcacatgtatatcctgggtcaggtggttgtgcacaaactgcaggtatcaagattcaattaggggtaccgccagcatttcggaaaaaaaccacgctaaggattttttctataaaaagcaggaaatgtaagcatttttgttgcttctctatataattcatcttcttccattctcttgttgtgtctttgtaatttttcttcaaaatcttcagatttacttatctttatcattctgtctcacctttatctaaaataagaattttgtaaaaaaattaataaattctccagcattgtgcactctatacctaaaaggactaattatgaaaattctaaaattcatcatctttacatttgcctggattatatatgctgcatttttgtatgccatattctttttatgattattttttatatacataagcttaagaattataaactctttaattttcatcttcccaaaataactattttgtccagttttctaatagctctacattctcatagatattaccttttacatgatttagatttaattcactccacagcaattcagcatgatccactccgttacaaatccaccaagcgccttccatctgcttaactgctcctgtgaatccatctgtttcttccatacgatcatgaaattcttgatagacaatgtccccttcgtaaatttcactgccttttacatcctcaattcccgtgtatcgaagtaactcaacatctttcaaaggagagatatacaccgcataacaaatgccatcaacgatatgtgccaattgcactctttctttagcaaagtctataaatccgacttcatacattttctccataaccttgtcccacgcccgaaacttaatatcttccatctctcattctcctttacgaataattttttttacattacacatactatctacgagtcagctacattctttcaaaacggagctttacccctccggactgtttaggcatttggcaggtgatttggtcaattacctgccattccgattaaaataacgcttttgttaaaaactttttgtccatgtaatcattagcaatgacttttctgttgacgggccacattgattctttatttctggatctaaccatctatccccgagatgatgttcagctacttcctgtgctatctcaataaattcccaatcagatatacccttcaaatattcaagagctttttctttatccatatcaacactccccgtttcttaacaaaattcaaatttgataacattccaggactccctcatttaagaaagtcctggaaatatagtttatttaacttgaaccaatggattagcttctccacttacttgtggtaacttgccatcccatttttcaatttttttaatttctacaatttctggagttaaagacttcttaataatctcatttgcttcagcttttcctctcgcttcctcaatggctttctctgcattgattgtagcttgctttttctcaatctctgctttttcaaggttttgttgagcatctactactccttgaatcgcttttgctgtatttgcatctggtttaggagcttctaacgtaacagaatctactaagaagccagtagtatctaccatttttctaaactccttttctattgccccattaatttccccttgatgttggaatacttcaagaactgaatagttagagaaaacgtttaatgtagctttcttaagtcgagtttgtaaccacccgttctcaatcacatctggggcctgtcctttgaacttgttataaatcttaggaagtttctctgcatcattcatgtaatcctctgatataatcagtcttataaattataagggctggtatataaatgaaattagatagtaataaccattcagtattcttgttatattatcaccttgtgttggtcgtgaaatacagaagaaatgtgtttgatgatgatatgtcagactatgcaaaagagatgtttgttcgactatctgaaaactataacatcacgttagttgaatggaatcatgatgtagaccacgttcatattttgttcaaggcacaccctaatacagaaatgacaaaattcatcaatgcttataaaagtgcaagttctcgacttattaaaagagactttccacaagtgaaaaagaaactttggaaagagatgttttggtcaagaagtttttgcttgctaactattggtggttcgccaatagacgtagtaaaaacatatattgaaaatcaaagtgaaaagtgaggtgaaatgatatgacaaagcagaataaagcatataaattccgtttgtatccaacaaaagaccaagcacatcttatgcgtaaaaccttcggttgtgtacgtttcgtgtataacagaatgttagctgaacggaaagaagcgtatgaaaaacataaagatgataaggatcaactaaagaaacaaaagcttcccactcctgcaaaatacaaagcagaatttgagtggttaaaagaagtggattcattagctttggcaaatgctcaactaaacttgcaaactgcctataaaaatttctttcgtggtcaaaatgacttcccaacattcaaaagcaaaaaagacagaaagtcttatacaacgaatgtagtgaacggaaatattatgttgcttaacggtcatatcaaattgccaaaactgaaaatggtacgtatcaaacagcatagagaaataccacaaggccatataatcaagtcatgtacgatttctatgacacctactggtaaatactatgtgtccattttgactgaatacgaaaaagagatcgtacaaaaagaagtagaaacagttgttggattagactttgcgatggaacaattatacgtcagttctgaggatgagagagccaattatcctaagttctatcgtgaaatgttagaccgattagcaaaggcgcaacgagtattatcaagacgtacaaaaggttctattcgttggaataaacaacgtatccgtgtagctaagttacatgaaaaagtaacgaatcaacgtaagaacttccttcatcataagtctaaagagttagctactcattttgatgttgtagctattgaagatctaaatatgaaaggaatgtcgcaagcacttcattttggaaaaagtgtcgctgacaatggttggggtatgttcacttcttttttagcttataaactacatgaacaaggcaaacaacttgtgaaaatagacaaatggtttccttccacaaaaacatgtagcagttgtggagatgtgaaaaatatgtcattgtctgagcgagtctattcttgtatatgcggtgtaaatctcgatagagattataacgcagctatcaatatcaaaaatgaagcaatacgcctattggcgttagcatagatagcaataaaataacccttggaacaagggagttagctcggctgtcttaggacgaattcgttagctaccaaaagtaacgactaaccgagaagcccccacttcaaacagtccgttagggactatcaatagtcgttataatgatttaactaggcttattggcaactatacagattatgctgtacgctggtacaatacgggattagaacgtgtatggggaccggattctagagattgggtaaggtataatcaatttagaagagagctaacacttactgtattagatatcgttgctctattctcaaattatgatagtcgaaggtatccaattcgaacagtttcccaattaacaagagaaatttatacgaacccagtattagaaaattttgatggtagttttcgtggaatggctcagagaatagaacagaatattaggcaaccacatcttatggatatccttaatagtataaccatttatactgatgtgcatagaggctttaattattggtcagggcatcaaataacagcttctcctgtagggttttcaggaccagaattcgcattccctttatttgggaatgcggggaatgcagctccacccgtacttgtctcattaactggtttggggatttttagaacattatcttcacctttatatagaagaattatacttggttcaggcccaaataatcaggaactgtttgtccttgatggaacggagttttcttttgcctccctaacgaccaacttgccttccactatatatagacaaaggggtacagtcgattcactagatgtaataccgccacaggataatagtgtaccacctcgtgcgggatttagccatcgattgagtcatgttacaatgctgagccaagcagctggagcagtttacaccttgagagctccaacgttttcttggcagcatcgcagtgctgaatttaataatataattccttcatcacaaattacacaaatacctttaacaaaatctactaatcttggctctggaacttctgtcgttaaaggaccaggatttacaggaggagatattcttcgaagaacttcacctggccagatttcaaccttaagagtaaatattactgcaccattatcacaaagatatcgggtaagaattcgctacgcttctaccacaaatttacaattccatacatcaattgacggaagacctattaatcaggggaatttttcagcaactatgagtagtgggagtaatttacagtccggaagctttaggactgtaggttttactactccgtttaacttttcaaatggatcaagtgtatttacgttaagtgctcatgtcttcaattcaggcaatgaagtttatatagatcgaattgaatttgttccggcagaagtaacctttgaggcagaatatgatttagaaagagcacaaaaggcggtgaatgagctgtttacttcttccaatcaaatcgggttaaaaacagatgtgacggattatcatattgatcaagtatccaatttagttgagtgtttatctgatgaattttgtctggatgaaaaaaaagaattgtccgagaaagtcaaacatgcgaagcgacttagtgatgagcggaatttacttcaagatccaaactttagagggatcaatagacaactagaccgtggctggagaggaagtacggatattaccatccaaggaggcgatgacgtattcaaagagaattacgttacgctattgggtacctttgatgagtgctatccaacgtatttatatcaaaaaatagatgagtcgaaattaaaagcctatacccgttagaaaatgtacatatttattcaagcgttaatgtacatatttaagttagcatttataatataaatataaaataaatatttatgtcaacgaagtgttaatttaaagtgaatgacgctgagaaaaacttaaatattttctaaatcgagttatatagtattgaaaattaaatatagatttacgtacaaataaaaaagccgcatttgcgacttatgaaatcataggattaactccttttttggttgaatgattagcgcttaatcgcatcaacaattagcgatggaaaaccaagtttatcgcctttatttctagaatcataccttttcgaacggaaaataacaccgtcgtttgcatcccattcgttgtaataaaactgaccattttcatcacaatattcaagtaaaactacctcgaatccagcagtttcaaacattttcgttaatgttttataattatgaacgattttatgacttgctgctggatgatctttcggaccgggtccccctatttgaactatattttgatatacctcatcctgaaagaatgcatcagggactccgcaccgaatatgaccagatggttttaaaaattcataacagatttcagctgctcttacaccttcttcaaaagtaaggtgttcccatacatgctcagctaaaatagctgaaatagagttgtattcaaatctttcttcccacgtagctttatctagtaagttaagttcatcttcttgcgtttgaatccagcctggattattattaaacactccagctccgacaactactttaatttcgtcttgttttattgccaccatgttcacctcttaaacattttaattcattaatatattctatgtttactattatccttcctccttcaacaaatgtagtaacatgagtccagtacaataccgaactcatgccctaaaaactctctaacgcaacaatctgtctaactctataaaatcagttcataatatacgatttttcttacagaaatatagcacaccaaacattagcataataccaattacgtaaaaaattgttgttccgctcccaccagtattaggaattacccaattattcttcgcatttttcactgttattttttgtttctttactgcttctgtaatttctatttctattggatctctaagtaacatgtatccgttcggtgcttttatttctttaatcgtatacttaccaattgctaattggttggaaattacctttcctttttcatccgttattaatctactaagttctttcccttctttatctaacacttgaaatacagcgccttttagctttaattcactatccttatcatcaactttttcaatttcaaattgcccagtcggatctggcaatttcttattttctattttaatttctactactgtatctttttctatttttacagctattttatcttttaataattcataacctttaggtgcctctatttccactagggtatagtttcctattggtaagtcctttgatattatttctcctttttcatctgttattaactctccaactacttttccttttgcatcttctatatgaaactttgcccctgctagttttttatttttatcacttatgtctactttcacaagcttcatttttcccattggatatcggattgtacagcacttaccactaaatgagaatggttggcatgccggagacgggaatggagcgggtaatcgctcgtctatcggcattgaaatttgtgaaaatcgtgatggtaattttgaaaaagccttaacccatgctgcgggtctcgttaagtttctcatggctcaccttggattaaagattgggaacgtagtttcccatcaacattggagtggaaagaactgtccacgtccgatatttaatcgaccaggtggatttgagggtttcaagaggatgattgaagatagtctaaacgatatggttgtagagaatcataacaaggatgcgggtacacaaggattaggaattgcttacatggaaggtgtaaatattaaccttcgcagaggacctagcacgagtagtgatgtaattcgtaaattgaacaaacctgaatcttatattgtttgggaagaacgtgagggctggctgaacctaggtaattcatgggtgaaatatgactcttcctatatttactttgcccgtagacaaacgagtaatattggtaaattagtggttgtagatacaaacgaattatgggtctatggttctgctaattggaatgataagattaagactgtaaaaaaaggggaagcatttacaattcaagatgaattgcaggtaaatggttctaacatgtataagtgtaagtatttctacattaccacaaattctcaatttgtatatgtaaaataggaaaagtggattttatatataagtataaaaagtaataagactttaaaataagttaacggaatacaaacccttaatgcattggttaaacattgtaaagtctaaagcatggataatgggcgagaagtaagtagattgttaacaccctgggtcaaaaattgatatttagtaaaattagttgcactttgtgcattttttcataagatgagtcatatgttttaaattgtagtaatgaaaaacagtattatatcataatgaattggtatcttaataaaagagatggaggtaacttatggataacaatccgaacatcaatgaatgcattccttataattgtttaagtaaccctgaagtagaagtattaggtggagaaagaatagaaactggttacaccccaatcgatatttccttgtcgctaacgcaatttcttttgagtgaatttgttcccggtgctggatttgtgttaggactagttgatataatatggggaatttttggtccctctcaatgggacgcatttcttgtacaaattgaacagttaattaaccaaagaatagaagaattcgctaggaaccaagccatttctagattagaaggactaagcaatctttatcaaatttacgcagaatcttttagagagtgggaagcagatcctactaatccagcattaagagaagagatgcgtattcaattcaatgacatgaacagtgcccttacaaccgctattcctcttttggcagttcaaaattatcaagttcctcttttatcagtatatgttcaagctgcaaatttacatttatcagttttgagagatgtttcagtgtttggacaaaggtggggatttgatgccgcgactatcaatagtcgttataatgatttaactaggcttattggcaactatacagataacgaaacaaacaacgtgaaacgtcaatttttattttagatgctagacaaactaactttattggagagtttgatcctggctcaggatgaacgctggcggcgtgcctaatacatgcaagtcgagcgaatggattaagagcttgctcttatgaagttagcggcggacgggtgagtaacacgtgggtaacctgcccataagactgggataactccgggaaaccggggctaataccggataacattttgaactgcatggttcgaaattgaaaggcggcttcggctgtcacttatggatggacccgcgtcgcattagctagttggtgaggtaacggctcaccaaggcaacgatgcgtagccgacctgagagggtgatcggccacactgggactgagacacggcccagactcctacgggaggcagcagtagggaatcttccgcaatggacgaaagtctgacggagcaacgccgcgtgagtgatgaaggctttcgggtcgtaaaactctgttgttagggaagaacaagtgctagttgaataagctggcaccttgacggtacctaaccagaaagccacggctaactacgtgccagcagccgcggtaatacgtaggtggcaagcgttatccggaattattgggcgtaaagcgcgcgcaggtggtttcttaagtctgatgtgaaagcccacggctcaaccgtggagggtcattggaaactgggagacttgagtgcagaagaggaaagtggaattccatgtgtagcggtgaaatgcgtagagatatggaggaacaccagtggcgaaggcgactttctggtctgtaactgacactgaggcgcgaaagcgtggggagcaaacaggattagataccctggtagtccacgccgtaaacgatgagtgctaagtgttagagggtttccgccctttagtgctgaagttaacgcattaagcactccgcctggggagtacggccgcaaggctgaaactcaaaggaattgacgggggcccgcacaagcggtggagcatgtggtttaattcgaagcaacgcgaagaaccttaccaggtcttgacatcctctgaaaaccctagagatagggcttctccttcgggagcagagtgacaggtggtgcatggttgtcgtcagctcgtgtcgtgagatgttgggttaagtcccgcaacgagcgcaacccttgatcttagttgccatcattaagttgggcactctaaggtgactgccggtgacaaaccggaggaaggtggggatgacgtcaaatcatcatgccccttatgacctgggctacacacgtgctacaatggacggtacaaagagctgcaagaccgcgaggtggagctaatctcataaaaccgttctcagttcggattgtaggctgcaactcgcctacatgaagctggaatcgctagtaatcgcggatcagcatgccgcggtgaatacgttcccgggccttgtacacaccgcccgtcacaccacgagagtttgtaacacccgaagtcggtggggtaacctttttggagccagccgcctaaggtgggacagatgattggggtgaagtcgtaacaaggtagccgtatcggaaggtgcggctggatcacctcctttctatggagaattgataagtctgtccaaatgcaggcttatctcaccgcaacttgtcaaaacatgaaaaaaaatagccctccatctgaccaaaaaaggtctggtggagggccatttttttgaaactctattattttatattgtttttattcgctaaaatcaaaaacaaactcatcttatgaccgcgtttcttcttacgaaattaagtaattgtttcaatagctggttttttagtcatagaattactttatctctcagctttattattctgttctttcgcctaaaattccaatatccccattacttccttcgtaaatagtttgaaatcagttaaatgtttttcaataatttgacgaacaatatctaaatttacactttgataatcatgaacagcaatattacgaaatccaaccatcgcctttaacttatttgctagatcagcgctaaggaatcctgctgtaaccaataaatcaaaggcctctcgactagattggggtagtcctaattttttcccagcaacaatatgcattgctagatcaatactcgcttcacaagctctttgtatattcaatattattgaatcttgttttgtaaagtcctctaaattttcagggtcatttccatacacatcttggattctttttatacaacgctctattgtagaaattttatttaaaataacctcattcttcatatatagaacctcttttctttatatcatcaaatactacctgtcgttcttcattcaattttgaatacatttttaaagttttcatttcaaaaataaccttacgtttttcatcggaacaaaatattgtctttcctgtatgtataatctgagcttgaaaaactgtagaagcttcggataaatcaactaaatcaacatccctctgaacaatgttagctaactcctgtgctaataaaaaacgttcatagttccctaatgttgtgtcacttacataagctatatcaatatcactatcttctcgttctctgttctcagccgttgatccaaacacaattatccaatagggattcaccgtctcttgtaatttttctataatagctgttatcatgctttgaaaaatcatttaattaatcccccttattgtacttgaattttattatatcataaccaatcataaatcctttaaacgactataaatacgtaaacaaaattaagcttttttagtacttaactcctcacaaaatcagaagcttatttctgacctaaaattattatagttcaggagtagatatattgtagctttggatcttaaataattgttaataatccaacactttcctgttaaatgccttttttattttcttcctgcaaaattaaaagactgacaataactgtcagcctcttactttaacaactctaaagaactttcgcctatttcacaatatacattctaatagtttgaggatatattgctctattgaactacccccactttcacttcgtttagaagtgagggattcctaagtaaagagttctatcgaactctaattgattaggctaaccccgcagtccttgcggttagaagccttatcgcttcatgctttagattgatacttgcgttaatatccctatcatggtgtgtacgacaagaaggaaaagaccaactatgagaagtcaaggggagttttttatataaatagggggtgtttttctaaaaaagggcgtgccaaataaacctaaggattttcaaaaaaaatgaaaaggtcatgtttctgttgtgtgaggtggtacttcataaggcttattgcttttaagaatggcatagataatgtaacacagctttctagctaccgcccctatacaaacatagtagtgctttccttgctttcgtttcttttcataaaaagcttttaatacagggtcatgtttatgcgctgtaatagccgcttggaataaggctctacgcaaatgagaagaaccacgtttggatatagacgtacctgaggcttcaaattgtccagattgggacacagaggcatcaatgcctgcgtaagcgacaagtttagatggtttgtcaaagcggtgaatatccccaatttcacttagtatagtggctcctaaaatgggcccaacaccaggtattgtcatgataggagtatctaaatcaattaaaagttgtgacatttcttcttcacattctttgatttgatcttcgataaaacgaatttgttccatcaacatttttagttggaaggaaaaagcgtctttacagaaggtaacaccaaacgaattagaggctaattccattagcttgttggctgttttcttccccagtcgattacgactggtttgctcaattatttgtgttaaatcatcaatagatatctgttcatagtcactaggagaggcatattcaagtaagatttgcgaagaagttttaccaaaaacatccgaaaagatgctttggtactctgggaaagtctgatctaatacgacaagagcttttcgttttaaatcactcatattacttacaagcgcattacgaaagcggctcatttgttttagagcgaacattttctcgtccacaagtggggtttcaacaaaacggccgaatcgaatgatatcggcaatcatagtggcatcaatggcgtctgtttttcgctttctaatttctgttccttttcgccaagcattggtttgaattggatttaatacaacgactgagaagccatgatcaagtagaaaagaataaacggctaaccaataatgtcctgttgcctccattccaatcagtatttctgtaggagactcaatatattggtacatccaatttaacagtgcttgtccgccttctttatgattctgaaagggaaatggcttagtaataggttttccagtttggtcgataatggacgcataatgtttatgtttagcgatatcaatacctaaatagaacatagcttacacccctattttaatcagtgttagatagtgttgtcctcctctgaactaataagcgctactacctcgtaagagatacgaagaatgaccaatggtcatcaacatccaactcattcgtaaactacttattagacagaggtaccattctttcaaccgaatacaaagattcaaggaggtggtcggcaacactctatctacaaatataagtatctcatataactagatactcacgggtttataggtaaatccctttcctaaaaaacctaactttatcatacgaggcctcgtatgattaagttaggtttttagggacgggatgtacctataaatccaagggtatctatttttatgagatactaatatttgtagatagagtgttgccgaccatctccctgaatctttgtattcgtaaaaaagagcggtacctctgtctaataagtagtttacgaatgagttggatgttgatgaccattggtcattcttcgtatctcttacgaggtagtagcgcttattagttcagaggaggacaacactatctaacactgattaaaataggggtgtaagctatgttctatttaggtattgatatcgctaaacataaacattatgcgtccattatcgatcaaacgggaaaacctattactaagccatttccttttcagaatcacaaagaaggtggacaaacccttttaaatcagatctaccaatacattgagtctcctacagaaatactgattggaatggaagccaccggacattattggttagctgtttattcttttctactggatcatggattttcagtcattgtattaaaccccattcaaaccaatgcctggcgaaaaggaacagaaattagaaagcgaaaaacagacgccattgatgccactatgattgccgatatcattcgattcggccgttttgttgaaaccccacttgtggacgagaaaatgttcgctctaaaacaaatgagccgctttcgtaatgcgcttgtaagtaatatgagtgatttaaaacgaaaagctcttgtcgtattagatcagactttcccagagtaccaaagcatcttttcggatgtttttggtaaaacttcttcgcaaatcttacttgaatatgcctctcctagtgactatgaacagatatctattgatgatttaacacaaataattgagcaaaccagtcgtaaccgactaggaaagaaaacagctaacaagctaatggaattagcctctaattcgtttggtgttaccttttgtaaaaacgctttttccttccaactaaaaatgttgatggagcaaattagttttatcgaagatcaaatcaaagaatgtgaagacgaaatgtcacaacttttaattgatttagatactcctatcatgacagtacctggcgttggaccaattttaggtgccactatactaagtgaaattggggatatacaccgctttgacaaaccatctaaacttgtcgcttatgcaggcattgatgcctctgtgtcccaatctggacaatttgaatcatcaggtatgtctatatctaagcgtggctcttctcatttacgtagagccttattccaagccgctattacagcccataaacatgaccctgtcttgaaagctttttatgagaagaaacgaaaacaaggaaagcactactatgtttgtataggagctgtagctagaaagttgtgttacattatctatgccatcctaaaaaacaataaaccgtatgaaatccctcaatattcaaaagaagtttgatacttttatttttttaacatctcttagggttatttggtgcaccctttttttaatttcctatttataaaattcctcttgacttctcatagttggtcttttttaaaatgtaccctatagaatagacacttgaaaaaagtctattctatagggtatttcttgtataataaaaggaaaattgggatcggagaatgttgaaaatgacaaaaaaactatttacagaaagagaaattcaaattctatcaaataacctatacgtaaaatctgtaagtcagaaaggtatcacttatacagaggaatttaagcatatttttattgaggaaaatgaaaaaggaaagctacctcgaaatatttttgaagaatgtggttttgatatagatatgattggaatgaaacgagttatgtcatcgggaagtagatggcgtgctgcttatagaaaaaatggtgtattgggtttaagggatacacgtatcgaaaacgctggaagaactcttgagagagagcttacgttagaagaaaagtatgcccgtttagaagccgaacgaaacttactaaaggcggaaaacgaattgctaaaaaaaatcaaacttatggaagggaggatgagaaggaaataacactaccacctagtcagaaattcatcttgattcgttctgtcatcatgaaatacaacttaaggaatatggtcagtcatttgtgtaaagtagctggtgtatcccgttcgggatactataattacttttcagtttcatctcaagaacaacggaaacaaaagagtgatcgagatgaaatcttgaaggaaaccatattaaaagcacttcgatttagaaatagaaacaaaggggctcgtcagataaagatgacattggcgggtcagtttcaagttgtctacaatttaaagcgtatccgtagaattatgaagaaatacgagattatctgtccggttcgcaaagcgaatccttataaaagaatgcttaaagctacaaaagaacatcgaatagtaccaaatcaattaaatcgggaatttaaacaaaataccccagggaaaacacttcttacagatatcacctatttagtttacggtaagaatcaaagggcctatttatctacaattttagacggctcaactaatgaaattttagcttaccatgtttcagaacagatgacattagagctcgtaacgacaactctccataaactaaaaaggaatccgcggattcgattgactgaaggtgcttatattcattcagatcaaggatcccactacacaagccctacctatcaaaagctagttaaaaagctaaacctaggacaatccatgtcaagaagaggaaactgttgggataacgccccacaagaatcattttttggtcatctgaaagatgaagctcatataaaaccttgcgtgtcctttaatgaattgaaacaagagattaagaaatatatgacgtattataatcattatagatatcaatggaatttaaaaaagatgactcctgttggatacagaaaccatcttcttgatgttgcctaacttttttcaaaatgtcctttacaaagggtacagattatgtggtgtggtgaatacatcgtcagagtcctccgcaatcataccgtaattaattggtagtgtaatagattcccctgactcgaagcgttcaacatctcttataaagtgatactgtttgatgtttacagagttgattttatctaaagcagagaatggaaggtcttctatgtccgttttaagcgtacgagaagaattagggataaattcttgcgcccacatacgtcctgtagcagatatattttcttgcgctcgtaatgttcttaattccatatctttccatcccttacccatcatatctttaatctgcaggccattgttataaccttgtacaaaacttgaccttatcattgcattacccataattaaatcatgatcggtggcgccgtttacgaaatgtattttatagtcactgccttttcttttgaaagtaaactgccccgcgttatttgtaaaaatatgtggttcagttgtagttacagagaagtaaccatatcctggagcccatccttcagattcaaaaataatattattcaagttttgaaaacgaaattgtccatcagaatatacgctcagatgtccaccgtcattatgcatttgaatatagtttgaccaaatattagttccttctgcattttctcctttagaaatcccaaatttcgcatatgctttagaaggttgatcaactccattaattcgcggcatgacttgataaatataaaatgatcctgtaccagcgtattttctattatcagaaccaaggactaatgaaggttgaatacttccatcatctgtttccataaatcctatatagccacgtggcttatctaaatcgaaaatcttcatgtcttgcttatttatttcaacaaatctgtttccacttgttttaagcgttaccccttctaaaacttttcctttaatatgatttgctgtaatgaaacctactaagttaattctgttcgcattcaacgtaatgttttctttgctcatattaaatgctgcaattacatcgttctcttttacagatagactaacgcccttttcagttaactgaagacgggtttccatatctcttacataagaatcttttgcaaattgtccatttgcttgctctattgtgtatacttctttcttttttgctgcggcattgataccctcttcattgatagtgaaacggttgtcgatcatagtcattttctgattaaattgttccgttgcaagtttattagctagttctcccaacaaatcttgtttatttttatcaactatttgcttcaactcaggtatcttaaacccagcaacataatcttctacttgcttaagttcaactttaccttgcagtgctttcgcagtattttcccatccagctttcgcctcttgtaattgtcttccttgttctgtctgcgtattttgtatgaaagagacattttgtttaatggtagttgcatctttttctacagttgaagtgcaccccaattgttagacacataactaacaattggaggtgcattttttatggctaaattttcttcaaaagataaaatacaagcagtaaaacgatatctagaaggtacggaaggcggaaaaaccattgctaattctataggggttcatcctagagaactttatcaatggattaaacggtttgaattttcaggggaaaaggcgtttgaaaaacgctatacaacttaccctctcgagtataaactagatgtaattcattatatgaatgaaaatgggacatctctgagagaaacagctgctttttttaatattccttcttgcgaaacactccgaaaatggaaagtagcttatgaaacagaaggattagatgccctaaaatcaaagaaaaaggggcgtctaaccatggccaaagaaaaagctaagctccaacatttaaaacaaaacgaagtatttcttgaaggttctatagaagcgctacaagcagagaatgaacgtctgcgtatggaaaatgactatttaaaaaagttgaatgccttagttcaaaagaagaaaacatcacagaccaagacaaagcgcaattgatttatgaattaaggcataaatataaggtcgttgaccttgtgaaagtcgctaatatcgctcgtagtacgtattattactggatgaaacaagcgaaacgtccagataaatataagaaagttaaagaattaattaaagagatttttagtgagaattttgggaggtatggttatcgtcgtattacattggaattacgtaatcgaggccatgcattaaatcataaaaccgttcgacgtttaatgaatatcctgggattaaaatgtcttgttcgattaaaaaaatatcgttcatataaagggactgtcgggaaattcgctcctaatattttaaaacgtaattttcacgcatcaaaaccaaacgagaaatgggtaacagatgtgacggagttccacttacatggtaaaaaactatatctatcacccattttagacttatataacggagaaattatagcttacaatatagaacatagacctgcctattcccttgtttctaaaatgttaaataaggcgtttcaatgtttgaatgataaggaaactcctattttacactcggatcaaggttggcattatcaaatgcgacaatatcatcagtcgcttaaaaaacataacgttatccaaagtatgtcccgtaagggaaattgcttagataatgcagtcatggaaaatttctttggcttattaaagtctgaattactttatcttaaagagtttgaaagtatggaacaatttaagcaagaactagaaacttatattcattactacaatcacaaaagaattaaaacaaaactaaaaggattgtcccctgtgcaatacagagttcaatccttagtagctgcttaatatatttgtctaattttttgggttcagttcaaaaaaacaaacgattctttcaacaagctgtcgaggaagaatcgtttgtttttttatagtgagtatctacattcctacacaatttttgtaggtttaattaggttcaatgccaaatataattaatgtttaattttctagatatctgtatagtgtggatttgctaattcctgtttcatcttttatttgagcaagactataatctccactttgatacataacaatcgcacgttttacattttcatcaggttttcttggtcgtcctggagtgattcctttctgttttgcttcgtataagcctttttttgttttttcacttatcacgtcactttgaaaattaacaagatgatttaaaatcaagctgaattgatatccagcttgattgcttgtgtcgattccctcagtaagagattgaaagtaagcgcctttcatatcaattttttctattaactccaccagatggcgtgttgaatcagccaatgtaaaaagttttgtaacgactattttatcacctgggttcaggttacttatcataattttaagatgtgttcttttttttgctgatgaatgttcctctgaaatgatttttgtgcactttactttttctaagttttttagttgtccctcgcatttcagatcatcttgatatggtctcatatatccgattaacatacatgctctcctaacagttaagatgtttcttttatcataccataacttggcgtcgaaaaatcagtatcaaaaaggttcctttttgggacgataagtgttagactgtttttattaaatcgtgaacgcggcttttatgagacttaaaagccacaaaataaatgatatgaggtgtataaaacagtggtagaaaaattaaaaacagaatggttttctaatgttagagcagatatcctcgcggggattgtagttgcactagcattaattccagaggcaattgcattttccattattgcgggtgtagatccaatggtaggattatatgcatctttttgtattgcagttattattgcctttgtaggtggtcgtcctggaatgatttcagcggcaacaggtgcgatggcattgcttatggttcctttagttaaagaacatgggctgaattatttattagcagccacaattttgactggtgttatacaaattatttttgggatatttaaagtagcaagattaatgaaatttattccacgtgctgtcatgattggttttgttaatgcgttagcaattttaatttttatggctcaagtaccacattttattggtatttccaatctgacatatgtatttgttgcgattacattagctattgtctatattgtaccgcgatttatcaaatccattccagctccgttaatagcgattgtattattaacagctgttacaatttttatgcacctagacttacgaacagtcggtgacttaggagcgattacaagaacatgaagtgcaccccaattgttagacacagtctaacaattggaggtgcattttttatggctaaattttcttcaaaagaaaaaatccaagcggtgaaacgatatttagatggtacagaaagtggaaaaacaattgctaaatctataggagttaaccctagcgtacttcgtgagtggattagacgatatgagtcttcaggtgaaaaggcctttgaaaagtgctatacattctacccagcccagtataaactagatgtactttattatatgaatgaacacgggacatctatcagagaaacagcggcacttttcaatataccgtcttatgaaacacttcggaaatggaaaatagcttatgaaacaggaggattggatgccctacaatcaaagaaaaaggggcgtccaaccatgaaagataaaaaaataaagccagtagatgaaggatcaatcgaagccttacaagcggaaaatgagcgtttacgtatggaaaatgcatatttaaaaaagttgaatgccttagttcaaaacaaagaaaaatcaccaaacaagacaaagcgcaagtaatctacgagttaaggcatgaatttcctatcaaggagttacttcaactcgcaaacattccacgtagtacgtactattactggatgaaacgttttaatcgtcctgatccaaatgcggaggtaaaagaactgattcaagctatttataatgaacacgatgggtgttatggttatcgtcgtattcgtgatgaacttatgaatcgtggacacaaagtaaatcataaaaaagtgtatcgccttatgaaagaattagggttaaaatgtctggttcgtatgaaaaaataccgctcttacaaagggacagttgggaaaattgcgccaaatattttaaatcgcaacttccaagctgaaaaaccaaatgaaaagtgggttacagatattacggagtttaagttatttggggagaagttatacctatcaccaatgttggatttatttaatggtgaaattatcacgtatacaattggttcaagaccgacctattcccttgtttcaacgatgttggaccaagccctttattgtgtaaccaatccggataaactcctcattcactctgatcaaggttggcactatcaaatgaaacaataccgtcattctcttaagaattgtggcataactcaaagtatgtctcgcaaaggaaactgttatgacaatgccgttattgaaaatttcttcggtatcatgaaatcggaatttctgtatcgaaaagaatttgaaagtataacacatttcaaacaagaattagcaaagtatatagaatactataatcataaaagaattaaggcaaaattaaagggtatgagcccagtacaataccgggctcataccctagaggctgcctaatgaaacgacctgtctaactttcgggggtcacttcactctgacgatgtattcaccacaccacagaaagacgctgtaacactttatagctcgtttgcaatttctattcaagcaatacaagaagttgactttaaagttaaaaatcttcaatttgaccacggtatgtggaagcaggaagttgacactcttaaagaacaacttgaagcagaaaaacttgagaaagtttcaatgaaagctgaaatttatgaattaaaggtattagtacaacaattaataaatgagaaaccagagcagccataagctgttttttattttgcataaaatacggctttgaatcaattcaattcatagatcaagaggagtgatttcgcttctctttttattttgaggagatgatcagtgtgaaacgaatagtagaccaagtaatttatgaaaagcatgttagccaagaaaacaaaaacctagtcaaagattttcttattgaaaagaaagcacaagggaaagcggcaagcactttaaaacaatatggttgggatttgcgaattattttgtttctaatacatcaacacttcgaaaataaaaatctgactgagttaacacgtaaagacatccgaaatttatctattatttttcaggagatgggaatgtcaaatgcacgtgtgaatggattaatgagcgcattacgttcagctcttgaattttgcgctgatgatgatgactatgagtatgaattcaatgtaggttcaagggtacgtggtttacctaagaatccaattagagaaattacatttattaatgatgaccaaattaattggttaattgatgaattactggaaaaagagaaatatatgttggcaacgtatttaactctttcttattacagtgcagcgagaaaaaatgaagtttaccaggttcagaaggaaggactgacagaacaatattatacaaatgtggtcagaggaaagcgcggtaagaagtttagattatattacaatccacgagtacagaaatgtattcgtttatatatagatcaacgaggtaaggatgccattccggatttgtttgtacgagtttataagaatggtgagagaagacaattaaacaaaagtgtatttaattattggtgcaagatatttgctaagatgctgaacgaaaaggaagggaaagagtttaaagtcaatccccactgtttccggcatagcagattagataatttaaaggtgcaaggtgtaccactcgaaaaattaaaatcgcttgctaatcattctgatatttctacaacggaatcttatctgaaggatagaagtgaagaagatattgcagagatatttgggatggatccaagttgctttgcagcttaatcaggagcatatgtatgcttctttttttattgataaaaagaccaactatgagaagtcaagaggaattttataaataggaaattaaaaaacgtttttcatcttcatctattccagatgcttgattttttaaaatcgattgcaagatatctttatgacctccaaatgctcggacatcttctccaatactatctcttaacttagctagttcttgaattaaattctgtgtatatgcttggttttgtttaatctcaccttgtaaatctgtaatgccttcttttaatgtatctgcatctccttcattaattgcttctactaatgtatcgtaataattgtcaaatgtggtatcatactctacaattcctgtaagggtatctaaaagttgtttttttatgtgagcatcccattttgtagcatgctctcttgcattcttttgatcttgtgcaatttgactaggtagatttgtatatcctttaatatcaattccttcaaagttaacatctggattattaattaacaaataagagtaatcattcatggattttgcaaataccccagcatcttgcaaagcttttttcatcttttcactgtttacagaaagagatatatcttccgtactggtttgttctattttactttcacttgcaaaagcagctactggtgaaactacagtagttgttgtcagggttaaaaacgtcgatacagcaagtagtttataaggaaaattattattcactttaattcctcctatgaatatatattaatttttagtttgttttttcttgtttaaaagcaatgtcttttgaaatgaattctgcgtccttatgaatgtcattccaactttgtttagcagcttttaaatcgtcaggtattaacgaaagtttatgttcttgcatttgatcgatattatcatataaatctttataattagcccccattttattccattgttgctgaatacttgttagagacattattgcttgatccactgtctgatacaaatatgttagagtgtctttcgtattagtaagtgaaataaccgcttgattagccagatcagctttcatacttaattctccgattttattcgaaatttcattataagaattcatatgattagatgcctcgacaccagctgctgttcctaaaccgataccagctgctcctagagctgtaagaccgccaacaacagctggtgtagctgtaccaccagtcacaacaattactaccgctcctgcaatcgttccaataactaaaatagctgctcctagtccaccgccaattgaccaggctaatacattatcaaaatgtgatttctgtgtagaacgtaaattctcaatttcggcctgaagttgtgggactagtgcttgttttcccgctaatatagccgtcaatcctccctgtccatctggaccaccaacattatttttaaaatctacagtatttgtatacaactttgttttgaaagcctctaacatcttaatgacgattttgtacatgcttaaacaagcgaaaatgtacatgtttatcttgacatttacacacagatcactgttaccaaaatatttactacaaatttttaaaaaaatgtactgcacaattgtattgaatgatatttttcagtccacgacagtaactctggcgctccatctacaaaaacatcctattttttcttattcccccttttcgaggggatgggcaaaaacacccattttcaatatatttctttactacgtctattggcgaaccaccagtagtgaataagcaaaaacttcttgaccaaaacatttctttccaaagttttgttttcacttgcggaaagtctctcttgattagtcgagaacttgcacttttataagcattaataaattttgtcatttctgtattcggatgtgccttgaacaaaatatgagcatggtcaacattatgattccactctaccaatgttatgttgtaattctcggataacctgacaaacatgtcttttgcataatctgatatatcatcattgaatacatttcttctgtattttacaaccaatacaagacgataatacaacaagaacactgaataattaatattatctaatttcattaatataccagtccttattatttataagactgattttatcaggggaaatatcaaaagcaaagcccttttgctccgtcaaactgaaattcatctcctacctatcgttgggctacgcttgaggaaggagtattctttcgtgggatacgttaaaaatcacaacactattgtctacaaagattttgttttcatcaatttatcattttagccaagaagactccttcctcaaggagcgtgaagggtcacagcccagtgagtaggtgggagatgaattggcgtcgaacaagggatggaaggaagccatcttaattgttcgacatacagaaagtgttgctccactatctatcgaatgtacgttcggtgtgtaatagtcatataccaaaatggaggtgaattaaataatgattaataaagcctataagtttcgtatctatccaaatcaagcacaagcaattctaatcaacaaaacgattgggtgttctcgctttgtattcaatcatttcctatccttatgggatcaagcatacaaagagacaggaaaaggcttgacctatggtacatgctctgccaaactacctgccatgaagaaagagcttgtttggctaaaagaagtggatagtattgcgattcagtcgtctgttcgcaaccttgcggatgcttatacacgctttttcaaaaaacaaaacagcgcaccgcgctttaaatctaagaagaacaacgtacaatcttataccacaaaacaaacaaatgaatgaaaaagacaattggtgatgcgcttgcccctgtggttagtgtttttgttgctgggttgcagaaacttgtggatggattcaacgcattacctggaccagtacaaaaggctatcgcaattacaggtggtattgttcttgcacttacagcaatagcaacagcaataggtgtagttcttgctgcattcgggatgattatgtcaggaattggagcattagcaacagcattaggaattgctggtggtgctgcaggtcttgctggtgctgcggttggtgtgttaggaagtgcattgggagtgcttcttggacctgttggtttaatagcagcagctcttattggaactggggttgtcgcatataaagcatatcaaaaagcaactgaagacagtatcgcttcagtagatcgttttgctacgaataataagttagcacaagatgaatatcaaaaagctttagctagttcagatgcagcaacaaaaaaatatatgaaacaacaaaccggagaaattagttcatcgactaaaaaagttcttggcgactattttaagttatccgatggtattagacaaaagctaactgaaattaaactgaatcatgaagtaatgacaaccgaacaagctcaaaaacttggtcagcaatacgatcaattaactgagaaaatcattacaaaagttgatgagcgcaagcaaaaagaaacggaacgcttgagaaaattgtttgctgattcatatgttcttacgagtgaagaggaaaataaaaggctagagttattaaatcaaaaatatgaagatgagaaaataaaagtagcagaaaagaatcagaaaataaaagagattaatgatttagcggcatcagaacatcgagaaaagacacatagtgagaatgttgctattcaagctttacaagacgaaatggatagaatagctgttcagcacatgacacaaaatcagatggagcaaaaagtaattcttgagaatatgcgtgtacaggctagtgaaatatccgcaagacaagcagcagaagttgttgaaaatagtgctaaaacaagagataaagtcattaaagatgcggaaaagacacgtaatgacaaaatagcagaagccattagacaacgcgatgagataggcagtttaaatgcacaagaagctgaggctgtaattgccgaagccaaacgtcagtatgacagcactgtttcaacagcacgagataagcataaggaaattgtgagtgaagcaaaatcccaagctggggaacacgcaaatcaagttgattgggaaactggtcagataaaatccaaataccaagtaatgacagggtatctaatcctgtttgctccccacgctttcgcacctgagcgtcagtctttgtccagggggccgccttcgccaccggtattcctccagatctctacgcatttcaccgctacacctggaattctacccccctctacaagactctagcctgccagtttcgaatgcagttcccaggttgagcccggggatttcacatccgacttgacagaccgcctgcgtgcgctttacgcccagtaattccgattaacgcttgcaccctccgtattaccgcggctgctggcacggagttagccggtgcttcttctgcgggtaacgtcaatcgacaaggttattaaccttatcgccttcctccccgctgaaagtactttacaacccgaaggccttcttcatacacgcggcatggctgcatcaggcttgcgcccattgtgcaatattccccactgctgcctcccgtaggagtctggaccgtgtctcagttccagtgtggctggtcatcctctcagaccagctagggatcgtcgcctaggtgagccgttaccccacctactagctaatcccatctgggcacatccgatggcaagaggcccgaaggtccccctctttggtcttgcgacgttatgcggtattagctaccgtttccagtagttatccccctccatcaggcagtttcccagacattactcacccgtccgccactcgtcagcgaagcagcaagctgcttcctgttaccgttcgacttgcatgtgttaggcctgccgccagcgttcaatctgagccatgatcaaactcttcaatttaaaagtttgatgctcaatgaattaaacttcgtaatgaattacgtgttcactcgttgagacttggtattcatttttcgtccgaggacgttaagaatccatgtcactttgagtgcccacacagattgtctgataaattgttaaagagcagttgcgacgcgcttcagcgctctgtcgcgaggtggcgtatattacgctttcctctttcagagtcaaccctgctgacccggcggcgtgtgtgccgttgttccgtgtcagtggaggcgcattatagggagttctccgctggccgcaaccgctaaatgacagaaaaatgactgactgctgcattccccagcaaaaccccgccttatacctttttacgcacagacttatccacaatccattgacgatcccggtgtgatccagcgatttgaacactatactagcggcaaatatttctctcgcgggtcaacctcttttaaattcacatacccttcaagagcttttttcgtaccttcacttacaccatcaccaaagcgcctactgtcctcttctgctttttgtgcctttttcccagcatctacgaaagcaaaacctaatgcaccaagtccaattacaactccaccaattgttgcgacaattggatttgctataattgcaccaataccaaaagaaaggaacccaagtgcactaactacccccataactgccggggctagtaataatgctgtcccatatacttttttagagctatcatctaatccgttgaaccaatcagcgacacccttcacagattctttcaattcaggaatcgcttgtttagcgatatctaaaatcaccttaccaagtggttctagagcaatttgtagttctcttgttacagatttccattgcttagcgcttgtatcgtaaccatcgaccattttgttcattgcgccactgtagtttccaagacctgtttccatattatttagtgataacatagtagtagcttcaaggtcttcccatttcacgccgaaaagtgcaacgcctaactgattcactttaatttgatcatccgttgttcgtaattcatttaaaacagcattaaaaacatctttggaagtcgcttttccttctagcatcgctttccaaactttttgcgtttctttactcatttgacccattgcttctgttgtggacttactaccatcttttacacggataccaaattcttttacaacgtcattcacataatccaagttatatgcgccatttttcgaaccattaatgagaattgtgaacattccatctgcactaaaccccatttcatggaacaaaggaccatactcacttaaattatcaaatagctcatttgagtagtttaaaccctttacagaaccttgtgctaataaatcaaatgcttgttggccagataaaccaaagcgtcccattaattgggctgcaccacgagttacctcgtttacatctgattccattgtttctgctaagatttcactatcacgagttacttgttttaaagtatcatcatcattaatatccttaatattgcgctttactttaactaaagaatcactgacactagctaaatcttccccatagccttcgcgccatacttctttggctacagcactaacctttaaactttcttcccttgttaatcctaaaccagattgtaccttcttgttcgcttcttcaaattgacttgcatttacgtgcgcccataagggggcaaggaaaaacggtgattgcaagctgttaggtcaaccctaaaagacctagtatcacttggctaaccttggagggaaactgaaaggggacaacagcatgccaagaaagccgtaagttggctaaacatcaagtcaagactgagcggcaagatataaagtatagataaggatgaaagctaaactgcttgaatgatagcacaagggaggccaccgtaactagtctcgaaagatgtttataaacgagattcaacagatatcataaagatagtgtgagtcatcttatatgaatagggttatctgttgcccacttctatatggaagaaaagtgtgaacgtcacatccgacactatacgtgcaaattccttgtttactaaatggggattgtctaagttagaatgcctgcgaggctattgaggataacttcaagatgtaacagtcaagaagtatggctcatgaatatctaatatgacaacggagccttcgtagtagtcagagctagggaaagcctagtacagggcgaaggaaggcagtctgttagcttattaccaaattggggaggtgcgaaaggcactatgcaatgtccaaaaatagtactaagcaatctgcgaacgaagagtcttaataaggaatatcaatatacaagactttatcgtaatttatataacccagatttctttttattagcatacgataatctaagtaaaaatgatggcgcattaacgataggagtagaccaaaggtctattgatggtttttctatgaaggaagtggaagacttgataagtgttttaaaaagtaaaagctatcaaccatatccatctagaagaacctatattgaaaagaaaaatggcaagaaaaggccattaggaattcctagcttttatgataaattagtccaagaagttatacgtatgatactagaagcaatatacgattcaagcttttctagttcatcacatggataccgaaaaggaaagggatgccatagtgcgttattagagataaagcgcacatttacaggtagtaaatggtttatcgaaggagatattaaaggatttttcgacaatattgaacatcatactctagttacaattcttaaaagaagaataaaggatgaggcgtttatagagttgatctggaaattcttacgagctggatatttagaagaatggaaatttcataatacctatagtggagcgcctcaaggtggaatcattagtccaataagtaaaaaaagagtccatctgatatgatggactcaatactgttttatctggaggggatttttttatggcaagaaaaggacaatcatttcaaaaatatacagaagaactaaagcgagaagcagttcgtcttcgattagaagagagaaaatcattgcgagaaattcgtgaacaactcggtgtgaagagcgatgcccagattattgagtgggtaaaacgtgcgcaacaaggggagtcctttgatgatcaacgtggtgtctggaatcgaaagaattttaatagtctagaagaagaaaatgcttatttgaaggcacaggttgagtatttaaaaaagcgcaatccaaatctacacgggaaggaatggtcctaaagaaagaacgattttctcttatcgattcattacgccaagcctatccactccgatggttgcttcaaatcgcggaagtttctaaggctggctactataaatggcggaaatatcataacgtgcagcgtttacgtcagaaaagggatatgtggcataaagaacatattttatctattcatcgtcagcacccttactatgggtataaacgtatgactcgtgctttggctcgagaaggaatggtaatgaatcataaacgtgttcgtcgtcttatgagagagctgggtattcaatctatcattcgaaaaaaacgtccgttttatggaagaaaaacatctgtggtatttaaaaatcatttgaatcgagagtttcaagctgaaaagcaaaatcaaaaattcgtaacagatattacttatgtacgaatcggagaacaatttgcctatttgtcggctgtgttagatttatacaacaatgaaattgttgcctggaagctatcttcaagaaatgatttagatttggttttaactacattacgtcaattagaagggaagtcattaactactaagccccttttccattcagatcaagggtttcaatatacatctaaatcctacgcaaaacagttagagaaattaggatttgtcggtagtcattctagacgtggaaactgttttgataatgcgtgtatcgaatcattcttctcacatttaaaaacagagaagttgtatttagtgtgcccaaaaacatatgaaatggcctaccgagcaattcaagaatatattcaattttataatacagaaagattccaagaaaaacttcacggcctttccccgatagaatatcgggaaaaggccgtggcataatactctttttatttattccaaaaccaatatttctgtcctaacttaaaatcagcatcacgcaactcgttgacagtacctaaaccgcctacataatcctcaacatctttctttttcatagttaatttcaatgcttcagaatgttgacctattgttgtagtagcctcactgagcgttttcccttgctgagtttgtatttcttgcactttaccgacgctttgtgaaatactatccgcggttttctctactgctgttacacgtttatcaaatccactctgattattttctacatttgttatggtttctttaattcccttcacattttgctcaatctcagttgtttttttcgtgaacgtttctttagaagtaacttcatcattagcaggttgccatgtagttcttatgttcccctcttccaatttcgcatgatgtgagtttaaattaccatcaatattgcgtccagaataataaaacctaatttgagttacatctttatcttttgttttgaacgtaacagttagaggtgcgtccttataatctacattaatctttaattgtgagtctgcacgtacagatttccattcttgctctccgtctgtataagttattgccgtttccacaccaaaccaaggatttgcattgagtttcgtcattttcccagtaaataagaaggaaatagtaaacgttttgtttctgtaattaatcttattggaaagagtcatttgcttactgtctgaccatgttccggtcatattctgtttgtttaaccctgtttctgaatcgcttgctagattaattgaacctacagaaatgttactcatgtcggtttgtaattgttcaatggtctgcttatttgaagtcgccgtattctttatttcatttgttgtttttgttaaaacgtttgttgtttgcttcacatcggcaatagtttgttttgtaccttcaactgtatcttccactgtatttaatttttcagtaatttcatcgtctttttttgttaataactcaatagatctagtaaaactctcgttagtctgtttcatttcagaaacagttttattaatttcaccttgagagttttgtacatttttaatagtttgcgaaacttcttggagaccatttttaacttccttgaattgtccattggtttcactttgcgcttcttccactttcttatttaattcttcttttgtgagtttaatatccttattaacctgctccagtgtatcttttttaattgattccacatccagcaacaaaaacactaaccacaggggcaagcgcatcaccaattgtctttttcattgtcgaaaacgctgaatctagtaatgtaagacgtccctttaatgtatcaatcttagtggctgcaacctcagctgctgtcacttttgacatggcatcccacatgctgtttaccccattcgcaccttctttgaaaagaatagttgcaccacgtacagcatccgaaccaaagagtgtctctaaagccatactacgttgctggtctgttaaatctttcatcgattcatgaagggttcctgaaatattttctaaactttgaatatgcccctgttgatcatagaatttcgatgataggaaagcggagcttgttgctaattcacgaaatgttgtttcacattttttattccatttcttcgctccttctgtcttcattacatatccttcaagagctgtttcaatgtctcccacacttctagacgctggtgtaactccatttttaaccaagaaatcaaatcctgcttgcgcattataagtgatgagccccagatctttcatttggttatatgcttctttagtagtggggttcaacctcatcagcatcgtttttaaagatgtacctgcatctgaaccttttaaaccattctgcgcaaatacagctagagttgtagctgtatctttaaacgtcatccctgctcctgctgctactgccgatgatgccgctaaaccatatttcagctcacgtacatctgttgctgaagcattagcggctccagataaaatgtttgctgcatccgcaacagaaagatgatctgctttaaatgcatttaaggctgtggatgcaatctctgccgcttcacctaattctagttctcctgctgtcgctaagttaagagcaccttctaaaccaccatttataatatctgttaaactaactccagcttttattaattcctctataccttgtcctgcttgaacactagagtattttgttgtttctcccatgttgacagctaattcgcttaatttcttcatttcttctccagtagagccagatacagctttcacattggccatttgttgctcaaaattcatggattcttctacagctgattttaaaccccgacctattgcataagtcattccgccaaacaccataccgatttgcattcctgcattttgcaaatgattacctaatgtctccatacgattaccaaaattcaataaacgattaccttgctgtgaaaaagacaattggtgatgcgcttgcccctgtggttagtgtttttgttgctggattgcagaagcttgtagatggatttaactcattaccagggccagtacaaaaggccattgcaattacaggtggtattgttcttgcgctaacagcggttgctactgttatcggagtaataatgggggcaatcggtatggttgtttctggcattggttctttagcaatagcaatgggtgtagctacagcggctactagtgtaacgggcgcagttttaggaatattaaccgcagctttaggaccagtagcaattgctttaggtgtggtagcggccgctgttggtgttggggtattagcatataaagggtatcaaaaagcaactgaagacagtattgcttctgtagatcgctttgctacaaatacagaagggaaagtaagttcttctacaaagaaagttcttggtgagtatttcaagctgtctgatggcattagacaaaagttgactgaaattagattgaaccatgaagtaataacagaagaacagtcgcagaagttaattggccaatatgacaagttaggtaacacgattatagaaaaaacaaacgcaagacaacaaaaagaagttgagggacttaaaaagttctttgcggattcttatgtgttaaccgcggaagaagaaaataagcggattgaacaaatgaatcaacattacgaacaagaaaagttaaaaacacaagaaaaagaaaataaaatcaaagaaatcattcaaacagcagcaaatgaaaagcgtgaatttactacatctgaaaggatttctttacaagctttacaagacgaaatggataggacagctatccaacatatgtctaaaaatcaaatggaacaaaaggttatttatgagaatatgcgagtacaagctagtgaaattacagctagacaagcagcagaagttgttgaaaatagtgccaaagcaagagataaggttattgaagatgcgaaaaagactcgagatgataaaatcgcatatgcgatacgtctacgagatgagtcaggaacacttaataaagaagaagcggatgcagctatcgcagaagcaaatcgtcaatataatagcacggtttctacagcaagagataagcataaggaaattgtaagtgaagcaaaagcgcaagcaggagaacatgcaaatcaagttgattgggaaactggtcagataaaatccaaataccaagtaatgatattacccatttctgaccgcatagtgtttatgattgcaatcgctacatcttggactttgtacttaccagatttaattccatcaacaaattcttctactgcaacccaaccttgctctcctaaatcaatcgttttacttccatcttcaaatgtttttgcgatgtcatttgcaacttcaatagatttttcacgagttgactggaaaagattatcataaacaatattagaatttgcaattaatgactctccatatgtttttacttcatcagcacttttctttctcagatcagcttcttttgaagctctatcttgaagtcgcttgaatagattctcatttgtgctttcaattatttcggaattcttaacgtactctccgaatcctcgaccctgaattttaattttttcagtttcagccttcgtaatacctgttgttaaatccatctcaacacctttggattctaacactttttgcgcttgttgaagttgttgctcatacccttttgttatcaatacagattgctcagagtattttttgttaatttgagctatcgcaatttcttgccctttagtatcagctattttgcttttcgcaaactctatttctttttgtcttgctttatctaattcatttgttaatttcgtatactctgaacctagctcttttactttaccttgaattgtctcaacagaagtatttttgttgaaattatccattgctttacctattttttgaatctcatccacactttttgaagctgcttttccaacctctgcatcaatagcttttaaagctgtaagaaataccgacttatcggccgcagtcatcttatatatttgtccattatattgtgtaagtaagctctgaattttctcatttgccttaataactgcttcttcttgtgccttaaatacttccatttgatcgttaacaattttatcttttgcccttaatactgcggaatcagtttctccagcaaaccaactatctaaatgagcttgtaacttgcctctatctttattaatcgcttggattgcctcgtctgctaacttaccaaattcgtcatgtgctcgttgtacagcctctttagccttatcacctgtcattgttggtatttcatctaatgttttaaaagcctgttcttttaaattcacatacccttcaagagcttttttcgtaccttcacttacaccattattacccatttctgaccgcatagtgtttatgattgcaatcgctacatcttggaccttgtacttaccagatttaattccatcaacgaactcttctactgcaacccaaccttgctctcctaaatcaattgttttacttccatcttcaaatgtctttgcaatgtcatttgcaacttcaatagatttttcacgagttgactggaaaaggttatcataaacaatattagaatttgaaattaatgactctccatatgtttttacttcatcagcacttttctttctcagatcagcttcttttgaagatctatcttgaagtctcttgaatagattctcatttgtactttcaattatttcggaattcttaacatactctccgaatcctcgaccttgaattttaattttctcattttcagccttcgtgatacccgttgttaaatccatctcaacgcctttggattttaacacttcttgagcttgttgaagctgttgtctatacccttctgttataaggacggactgttcagagtattttttattgatttgagcaattgttgccttttggttttcagaatctgtaatatgactctttgcgaattctatttctttttttcttgctttatctaagtcatttgtaagtttcgtatactctgaacctaactcctttactttaccttggattgtatcaacagaagtgttcttattgaaattatccatcgccttaccaatcttttgtatctcatttacactcttagctgctgacttccctacctcggcgtcaattgattgtaaagcggttaaaaacacctttttatctgattctgtcatcttatagatttgcccattatattgcgttaaaagactttgtattttttcattcgctttaataacggcttcctcttgtgctttatacacttccatttgatcattcaaaattttgtcctttgcacgtaggactgctgaatcagattctccggcaaaccaactttctaaatgcgcttggaatttccctttatctttatttattgcttgaatcgcttcatctgctaacttaccaaattcgtcatgtgctcgttgtacagcctctttagccttttcacctgtcattgttggtatttcatctaatgttttaaaagcctgctcttttaaattcacatacccttcaagagcttttttcgtaccttcacttacaccattgtggtgtggtgaatacatcgtcagagtcctccgcaatcataccgtaattaattggtagtgtaatagattcccctgactcgaagcgttcaacatctcttataaagtgatactgtttgatgtttacagagttgattttatctaaagcagagaatggaaggtcttctatgtccgttttaagcgtacgagaagaattagggataaattcttgcgcccacatacgtcctgtagcagatatattttctttagctcgcagtgttcttaactctatatctcgccatccattaccatacacatctttaatttgtaaattcatatcatagcctgatacaagactcgctcttagcattaatcttcccatgtttaaatcatgatcattaacgccattggcaaagtatatactgttaccagtactttttctatcaaaatgaaactcaccatagtcatttttaaaataatgtggctctgtggttgtcactataaactttccgtatcctggagcccatcccactgagttaaaaacaatgtcattcaaattatcaaagtataatcttccagctgcatatgcatacagatgtccaccgtcattctgcatttgaatatatgatgaccatatattggtgccttctgcattttctcctttagaaatcccaaatttcgcatacgctttagaaggttgatcgactccattaattcgtggcatgacttgataaatataaaacgatcctgtaccagcgtattttctattatcagaaccaaggactaatgaaggttgaatacttccatcatctgtttccataaatcctatatagccacgtggcttatctaaatcgaaaatcttcatgtcttgcttatttatttcaacaaatctgtttccacttgttttaagcgttaccccttctaaaacttttcctttaatatgatttgctgtaatgaaacctactaagttaattctgttcgcattcaacgtaatgttttctttgctcatattaaatgctgcaattacatcgttctcttttacagatagactaacgcccttttcagttaactgaagacgggtttccatatctcttacataagaatcttttgcaaattgtccatttgcttgctctattgtgtatacttctttcttttttgctgcggcattgataccctcttcatttatagtgaaacggttgtcgatgtaaatgtcaagataaacatgtacattttcgcttgtttaagcatgtacaaaatcaatcattttctttgctaaaatgatctttaattcgataggattgtcctacaatactgaccaccgtggcatgatgtaagacacgatctagtatggcattggcgagtttagggtcctggaatacttcgtcccaagacttgaagttgatattggtcgttaggatggtactacgcttttcataacgcatatcgattaattgaaagaataattttgcatcctccggatcaataggcaagtacccaatttcatcaataataagtaatttgtattttgtatagtgctttaaacgagattctaggcgattctcaatcttggcacgttttaaattttgaagtaaatcatgacatttaataaaataagtacttgttcgctttttagctgctgctataccaatagacgtggccaaatgggtcttaccaacaccactaggtcctaaaaatactatgttttcttgttgctctaagaaacgtagagaaataaaatctaagatttgttgtttattaatactcggctggaattcgaaatcaaactcatcaacctcctttctatgaggaaatgcgcccattttcaccatagaatgaatcatattttgttctcgtacatcaatctcatagtttgtcagtttaacaagtgtctctacgaaggataattcattattaatgctaaaatcgactacgtcacctaaatgttgtgccatttgttttaattttaaatactctaggtttgttgttaattgttgatagctattcttcatttctatatacctcaccaattactgataaattttgtttcgccaaattgtcaatgttcggatatttaggtagtgacttagccaatgcttttttataatgttcttctttataattgagcttagattggctgattttatgttgtacaattaacttcatgttatgataaacatatatttgattatcatatacttgtaaaccgacggttttaccttgatattcagctggaactgagtattgattcgatttgtaagatatcatgcctgatgtattaacttttacaagtttatgcttaatcatataggaatctcttatcgcgctcttcgggagtggttgtaggagattcttttcctgttttagggcaaacactcatatgtgtagagtaaacatccagcgccttattacattcctgtgataggtttccaaatgttcctccccgaaccggacttacatctctcaatgtatccggctctccatctgtcttctgcattttatatctcgcccttgtgtcttttcatatgacactctttacagagtgcgatagtctttcgatttctcgctatcatttgttgttcaagatatgatttatttgactttgctcgtagattctttaatctcttaatgtgatgcatatgtatcacaacattgctagttccgcatagttcacatgtttccgccttgattctatctgacaatttagtcgtactcattacatgccgagtatttggtaaaatgtctgttccttctagtgataaatttcttgtcattggaaactttctttcaatgaaatgaactttattcattcctttctttgtctcatactgtacagtaaattgtccgtacttttcgtatttctctcgaatttgtttcgtacgtgttctgtattttgacgcaaaagttttcaacattgaataatacatgaaatatgcaaagcggtgcatgtgattgctcacattttcagctagtcgatagtaattgtataaccctcgaatttcgctattatattgcgtgataatctctaaatcttcattgtgttggaaatatcctcttggctgaggtttccaagtgccatcggcacacattttaatggcctgatacttttgaagtttctttatccatgcctcatgtggcattttcaattgaattttaccgttaagaaccctagaagctctcccaagactgttaatgcgtgttgcttcacttttaaacactttaatttcaaatcctagaaatttagcgtgtttcttgaaggcatttgttatcagagtcttttccatagataattctagttttatctcttctttcaaaaatgaagctatctcatttttaataagaattgcatcctctttagaacctattactccaataagaaagtcatccgcatatcttacatatttgagccttctataattttcatccattggattattataaggtgtttgtaacaacttccctttcaaaactttttgttgttcttttagttccgtaattcgtgttacttctccatttagataggcagtatcgattttctcttgaatcttaaaaggtacaagagaatattaaaaacaatactgttgaaattatagaagctaagaacccaccaacaacagggcttaaacctaataaaacgctttggcgtgatatgagtaacggaaagcccggtattttaaaaatatggacaggtacagcttgggaatcagttgttcctgatgtggaatcagttaagaaagaaacactgaatcaggtgaataaagatattgaggctacgaaaacggagttaaatcaaaaggttaaagaagcacagaatcaagctacaggacaattcaacgaagtgcaggaaggtttacaaggtgtcagccgtacaattactaatatcgaaaataaacaaggtgaaatcaataagaaagtaactcagtttgaacaggattccaatggatttaaaacttctattgaatcgttaacgaaaaaagataatgatatcagcaatacattacatacagtcgaacaaactgtagaaggtacaaagaagactatttcggatgtgcagcaaacaacaagtgagcttaagcaaaaaacaactgaaatgaaagaagaagctgggaaaatcagtgagaagttgcagagcgtagaaaagaaagttaataacgataaatctggtggacgtaatcttttattaaaatcaaatgttaaatatgagaagaccgattatttaatcaatcaatacaattctactgaaaatttctctacaggtgaggaatatacctttgtaatgaaagggagtgtcccgcaaggtcagaaatttgggatttggcagaatggtgggtctagcaatgttggatatgcaacaagtgtttacgcgaatggaataacgtatgtaaccttcaaagctgttgcggctacaagtggaaatgaacgaaagttaagcttatataattatccgagtagtactacgaaatctattgtggaatgggttgccttgtataaagggaataagccgcaggattggacagcaccgcctgaagagcaggtaacaacggatgagttcacccagaaaacaactgaaattacaaaaagtgtggatggaattaaagaaacaattacaaaagtggaaaataatcaaaatgggtttgataaacgtgttgcgactgtagaaaaagatgcaactaccattaaacaaaatgtctctttcatacaaaatacgatctgccagcggagggagtaaaaatcatggatttgttccatcggaaccacttcccaaggcgtattcgtaacatatatgttgatacccgttaatcgtttactcttttctgaaaatgtaatcccctttttactttcggtatagctttgtttttttctacgttccagtatttgttcctctgttaatcggtagataattactcttgtaaataatctttgattcttgccaatatacgactcttttatttcatacgtttgtcctggttttaacgtgtgcataatgttctctaaatcaacttggatatactgtgactgttttttgattgtcccatttcgaaagtattctggaaatggatttttcgtatagacggtatggtttaacttaagtcttgatatatagcacacgccacgttgatccatttgatctaagtcttccaatgaaaaatatcctaaatcacgaatacacagatcacccggccgtaaggtatctaagcaatctgttccaaatgttttatcattattttttccaggacctacctggaagtttaaaaactgtccgctgtgtaagtcatattctaattgaatcttgatacctgcagtttgtgcacaaccacctgacccaggatatacatgtgctaaatgtttcggtacttggaaaatcgtcgcatctaaaatacggattcgttgaaaatacgtgagtgctgcacttgaaatggctgatgttttacaaagtttacttttccataatgcagaaaaaatatatttcaaaaattcaaccgcttttttatcaaagcgtttattgagtccttctggactcataagagtgcctgtggcggcgtgtaattgactgcatagtcgaacgagagaatcactcgctgtacgttgactgacccagatacatatggtagctaattcatttcctgaaaactttcgttttctttttacaaaacctaattctttagcgagttcttccaaaagagaaggggttaaatgacgatacagctcttcagaaaatagttgtaattcatcttgaattgaaagattcataaaaaatgtcatcctttctagctagctttttagaaagaataacgttttttgacacttgggggtagtgcaaattcttaagttgatgggcatggtttacaaggtgtcagtcgtacaatttctaatatcgaaaataaacaaggtgaaattgataaaaaagtaactaagtttgaacaggattctaatgggtttaaaacatctattgaatcgttaacaaaaaaagataatgatatcagcaataaattaaatacggtcgaacaaactgtagaaggtacaaagaagactatttctgaagtggagcaaacaactaatgatctaaagaagaccacaactgaagttaaagaacaagcaggaaagattagtgaaaagttaacaactgtagaaacaaaggttaatagcgataaagccggtggacgtaatctgttattagattcaaatgctaaatacgaaaaaacggattatttaatcaatgtattttcgctaactgaaaattttgttgcaggtgaagaatatacttttgtaattaaagggagtgtacctgcaagtcaaaagtttggtatttggatgaatggtgggtctagtaatgttggatatgcaacaagtgtttatgcgaatggagttacctatgtaacttttaaagctgtagcagtaacgagtggaaatgaaaggaagttgagcctatataactttccaagtaacactacaaaagccattgtagaatgggtagctttatataaaggtaataagccacaggattggacaccagctccagaaaatcaagtaacgaatgatgaattcactaaaaaaacaaccgagattgaaaaaagtgtggatggtgtaacaaatactgtatctaaggtgaagaatagtcaagatggattcgaaaagcgcatgactacagtggagcaaacagcaactggattatcttccacagtgggcaatttaaataatgtagtatcagatcaagggaaaaagcttactgatgcaaatacaaaaattgaacaacaggcaacagcaatcggtgcaaaagttgagcttaaacaagtagagaattatgttgctggatttaagatacctgagttgaagcaaacagtcgataaaaataaacaagatttgctgggcgaactagctaataaacttgcaacggaacaatttaatcagaaaatgactatggtcgacaaccgtttcactataaatgaagagggtatcaatgccgcagcaaaaaagaatctaatggtaccgagaacggttggcaaccaaatagatttataacacgtgctgaagctgctcaacttactgcaaaaacagatatgttacaacaaaatttaaacgatgaaaaagaggttattactgctacctcatatgaagatttaaatttaacagtggcttcgaaaattacagctcaagagattgatagttttattgcgaaatatcactcggatagtcctttagttggacatgggcaagattttatcaatgcgcaaaatcaatatggcgtgagtgctcattatttagcagcgcatgcgattttagaatctggatacggaaaatcagaaatcgcatatcaaaaacataatctattcggtctacgtgcatatgatggagatccgtttaaatatgcaaaatatttaccaagctacggcgatagcattgcttataacgctaattatgtacgagaaagatatttagaagaaagtggtatgtattataacggcccaacattaactggcatgaatgtgaaatatgcatcagataaaggctgggctaagaaaattgcgggtattatggaacgtattaaaccttttcatgtagaagactatacatatgcaaaaaaattaccaaagaatcctgaaacattagatgtcgacgcgttatcgaatgaaattccatataaaatgtatgcagacggttcaagctcaaatgttgtatcatcagctgcttactaccaggtaccttatccatttaatttaaaaattaaaagtagaccagatgtagctgtcgaggagaataaagttggtacagtaactcctggaacaaccatctttatttatcgtgaagatccgaatggatgggtagaattctcttttgaagctaatggagaaaaatattggacattaaaaaataaattaagtatgtaattaaaaagatctatttcattagttttaatcgtttagattttaatctcatataattgggagacaagttttttactttcttaaaataaagttatgtatacaagaaaagttagagaattattttctctaacttttcttcgctagtatttgaaattaaaaagatgggggtgtttttgcccatcccctcgaaaagggggaataagaaaaaataggatgtttttgtagatggagcgccagagttactgtcgtggactgaaaaatatcattcaatacaattgtgcagtacatttttttaaaaatttgtagtaaatattttggtaacagtgatctgtgtgacaatagaaccgaatcatgaaataaagcgttagcggagattaacgagcaataataagaggcgtttactatcttttcaaataaatgtttttgtacttatggtatactatatgtactttcgtttttacgaaatccctagaaagtatgtagaaaaggttctgacttttttgttagaaccttttcttattttttcgtaacaaatgcttcttttaaatttctgatccaaacagctttatgtaaatcggtatgagaaatccaattccctgattcatgagaaccgacaaattccttataaatgggatgccaaataataagatatgtttcattttcatattgtatctcatcaaattgccgcagcgattttcctaatatatcggattggccgataggtatggcccctttttctaaaatttctttaaactgtttcaaaggcatcacactccttagcataggtatatgtatatattttttaaagatgtattttttcctcttttattatagtaaatgaagagtggatattttaaaaatacatgtagaaaatgccctctatacataaggggtgaatgtcagctttgttatattactatgtatataatgaaagatttattgataggttgataggttattagataagtaaattagttataattaatatatagttttaattatataaaaaaccataataaagaaaggagttcaatcttcattagagtgaactccttcctttactatattttatattaagacatagaagaacctttaaatctttgttaggggtaaagatttaaagaaaagtttagcttaatgtcattttacatcattgcgtttctaataaaattgataattaatattctcattattaagattatttaggtgtataatacaaaagtataaatgctaacttaaatatgtacattaacgcttgaataaatatgtacattttcaattggattctccatactgactctgaggtggttagtatgtatattaagctagatattcaaacagaatttgaggttaaaagtctttcagacttaccaaattttaaaaaactaatggggaacttaaaaatgaagataaataaaagtcaattagccagagaattgaatgtggatcggcgtaccatagataagtatttgaatggttttacaccaaaagggacaaaaaataaaacatcgaaaatcgatacatattatgaagtgattgcagctcttttatctagtgattctaaacaaatcttctactacaaacgagtgttatggcagtatctaacagacaatcacggtttaaaatgttcacagtctgcatttcgtgcttatattaatagaaagcctgaatttagaacatattttgatgaggggaagcgtattttatcaggtcattcagtgggtgtccgttatgagacacctccaggagaacaagctcaattagattggaaagaaagcatacgatttgaaaccaaaagtggcgaaatcgtatatgtgaatgtagctgtacttttattgtcctactcgagatttaaagtttttcatttgaatatttcaaaatcacaaagtgttttaatgtcatttatgacagaggcatttgaaatgtttggtggtgtaccgaaggtaattgtcacggataatatgaagacggtaatggatgaagctcgaacagaacactttacaggaacgattaacaataagtttgcccaattcgctcaagattttggatttaaggtacaaccttgtatcgcagggcgaccaaataccaaagggaaagtagaagcgccaatgaaacttctagacgaaattcatgcttatcaaggaagattcacttttgaagaattacatgaatttgtgcaaaaattatgtgcaagaattaatcaaacatttcatcaagggactggtaagattccagtgtttgcccacctctatcaaataactaaagaaaacgtaggtatagttctatactcttatgtacattctgacgaaaccattaatcctgaatacgctcagaaaagaccatggagtattataacgcagtataaattaagcgccccatttaaatattatacagctaacatcaatgcttttgtccaaaatgtattcgtctatgccgatgaacccagtcattacattaaagaaatgctcgcgagaaatgaattaagtgatgaatcaaaagaaaaaattgttaaaatcatggatttcactctttccgaactcactggactgacatccgaatcaacatttaatgatggtaatgagttaatttctattgaggaccttttctatcagtatgaccgcgtcattccaagctggtcagcactaatggattacatatctattgactgtaacgcggctattttgcatgattggttgacaaatcatgctttggatttagcaaaacttagcaaaccatcaattgatgtcgaagactatgttccattatataaaaaaataatctgcagtgatttattcgatgataatacttatgaaactctcctatcctccattgaaatcaatattgaacagattgacgatcaactgagtgttcgtaacttcggtaggcttgttaaacttggcaagattatactttctaatgaatcatatcgaattatagagtcaacatacatcgagcctgacgaaaaactgactgagtatttagtcctattgttcagccaacataattctgtatcattactgtcaatcaaattaagtaataatttaaatcttaatgcaatacttctcgccagaatgatttcccgcggctaccgtaataaacctatcattgccgatatatgccataagattaatgaggctgatttatctaatgtattcatcaaacgtactcaagcaactatcacagccaataatgatgatctcgtatatctcatccttgaatattcccgtgatgcaggcatcattaaggactttgagaaacgtgataaaattaattatacgatttattgctctggaaagtcttataagtcaaaaagtaaaaattataaagacgctcaacttaaatatgtaccattgaaggctaacggcagttcgggtatcccttatgatatattctcactgatgagatccatgttctgtaagcctgatgttgttctcgtgctaggtgtttcaggttgtatttttttgcctctttttaaattcttttcttcagctaagattattacaaatattgatgggcttgaatggcgacgtgataaatgggggaaatttgcaaaatggttcttgaaatattcggaaaaaattgcggttcattattctgatactataattgcagataacgaagcgatatcaaactatgtgttaaaagaatatggagttaaaagtagtgtgatagcttatggtggcgatcatgctatcgggaataaagtagtggctcaagataaggataattattactttacagtttgtcgcatagagccagaaaataatattgaaatgatccttgaagcattcagccagacaaatagctgctttaaaatggtaggtaactggaattcaagcgcgtatgggcgtgaactaagaaatcgatatagtcctttcaaaaatattgaattgctggatccgatatatgacatcaacattctctttgagtacagaagtaagtgtcgaggatacattcatggtcattctgctgggggaacaaatccttcattagtagaagcaatgcatttcaatacggctatttttgcgtttgattgtgatttcaataggtattccactgagaattcagccttttactttaaaaattctaaagaactagttaacttgttggaacaacgatcacaggtgctccacacagctgaagatgagatttgcgcaaataaattacagcatattgcggaccaacgatatacttggattaatgttactaaacaatatgaagatctgtactgatacatgaaaaatgtcatttcattaaaaaatgaggagcctttgggatctttacttgataaaaaaagactggcttcagctctccgaaaagcttctttccttgcttctatagaaaatgaattagcagggttatttttgttcataagttgaagtgcctttattatttatattcgagatgtttttatctacaagagttagtcttaactccgagaatttatttcctgatattttataacactgattttcatttttttcaatataaagagatttgctttctgagctaccacatgtcgtagatgttcttgcatcgagaaaaataaacttttcttgaaatctttcaatgtatttcattgctgtcatgctaataataaaaagagcaactgacacagcacaaagggataagcctgatactaaacgattaaaattaaatttccttttaataactaatgaactagctaaattgaccatgttataggggaccataattataagtcctattaatattattttttcaggaagattgttcacctgtatatgatgttgagccaagcttccaatatatactgaaatcatagaggatattactatttttgctggggatacatctcgcaaaaatatgtatatatagactgtaattgcacaaatcattgcccctattggaaatgagagcatgaaagcataagctaatgtcgagtaattaaggttttctgggactataccataagctatgtcaagcttaaactttgcgatccataagcatacggaatatgtaaagccagttacgccccatttaactactgcattattaaatactttatttaataaatcacgatatcctatgtatacactggttaataaagctatagatgataggaaaattggagcggcaatgtatatattttctagccataatgggttttctacaatcaagtatccaaaaggtattaagtatattatagccaatagttgagggttgtttaattttgggattttgtacatgcttaaacaagcgaaaatgtacatgtttatcttgacatttacatcaaattaacaacttctcctacccgtaatcctgctaaaaattgaaaacatactcctaacgctatatcactggcttctgcttcttcaataaactcataaacaagtctataacgattaggaccaaaatcttttaatttttgtttctcatttctctgatttctatttggtcgctcaatgtcaaaaaacgacttactaaataaagacaaaggctgtcctattcttaaataatcttttttgtaattcacttgaaaatcttcgtctattaattcgttttcctttaaatatatatataattttgtaagaacattttcacaataattagagtgattaaaactaacaccttcgtatgtcaaatgtgtaataaaatctccaccatgtattaactttaatccttctaaccctttattttgcaatgctttatatcctgcaacctcatcttcaatgttactatagataaaattaagaaatttgcatatgaccctagcagctttaagttgagtgtgataacttactcctctattcctataagtttttctaataaaatctgtaatagggtgtggaataattaaatctttcacagtattttttaggcatatcagaactacttcttcacattgaatctccttccccaccctcttttgtataatcacgcctcttggtatccaatggaatttctgatctaatgttctcaaactattctccctccttaacatccatcattttttattttttaaaatattcttacttttgaccaccttaattctatactcaaaataaaaaagaagctacacacttttaaaaaagtgtgtagcttcttttttattttgaattgtgttgttattgatgttagtaccccatgcccatcaacttaagaatttgcactacccccaagtgtcaaaaaacgttattcaagagctcctatgttctcttggatacatcgtagtgctgaatttaataatataattgcatcggatagtattactcaaatccctgcagtgaagggaaactttctttttaatggttctgtaatttcaggaccaggatttactggtggggacttagttagattaaatagtagtggaaataacattcagaatagagggtatattgaagttccaattcacttcccatcgacatctaccagatatcgagttcgtgtacggtatgcttctgtaaccccgattcacctcaacgttaattggggtaattcatccattttttccaatacagtaccagctacagctacgtcattagataatctacaatcaagtgattttggttattttgaaagtgccaatgcttttacatcttcattaggtaatatagtaggtgttagaaattttagtgggactgcaggagtgataatagacagatttgaatttattccagttactgcaacactcgaggctgaatataatctggaaagagcgcagaaggcggtgaatgcgctgtttacgtctacaaaccaactagggctaaaaacaaatgtaacggattatcatattgatcaagtgtccaatttagttacgtatttatcggatgaattttgtctggatgaaaagcgagaattgtccgagaaagtcaaacatgcgaagcgactcagtgatgaacgcaatttactccaagattcaaatttcaaagacattaataggcaaccagaacgtgggtggggcggaagtacagggattaccatccaaggaggggatgacgtatttaaagaaaattacgtcacactatcaggtacctttgatgagtgctatccaacatatttgtatcaaaaaatcgatgaatcaaaattaaaagcctttacccgttatcaattaagagggtatatcgaagatagtcaagacttagaaatctatttaattcgctgcacacatttcttctaatccgcgtgttgcctcccagcctaattcacgctttgctttcgatgcatcagcaaaacatactgccacatcacctgggcgacgctctgtaattttataaggaactttcttgcccgaaactttttcaaacgcttcaaccatctctagtacactatagcccatgcctgtgcccaggttataagcatctactcctgttgtactcagtactttctcaagcgcctttacgtgaccatttgctaagtccacaacatggatgtaatcacggactcctgttccatctttcgttggatagtcatttccgaatacgcttaattcttttaacttacctactgctacttgcgttacatatggcattaagttatttgggattccatttggatcttctccgatacgcccactttcgtgtgcaccaaatggattgaaatagcgaagtaatgcgatactccattctgcatctgcaaatgctacatcacgcataatttgctcaatcattaatttcgtttgaccatatggatttgttgcacttaatggaaactcctccgtaatcggtgacgtttccgggataccatatacagttgcagatgaactaaagattatcttctttacattatgtttctgcattacttcacatagcactaacgtgcttgtaatgttgttatgataatatgttaatggaatcgctactgactcccctacagctttaaatcctgcaaagtgaataactgcttcaattgaattttcttcaaaaattgcgtcaagcgcttcgcgatttaaaacatcttctttataaaacttaaattgttttcctgttatttcttttactcgatttatagattctaccgagctattcgaaagattatccactactataacttcgtaaccgctatttagtaattctacacatgtatgactaccaatatatcctgctccacctgttacaagtattctctttttgtttatctaccatacgagataaaacatctactttagctcgtgtttgttctgtcgcattagaaaaaccgcccatgcctgttgtaatagactgaaattcagcctgtagagattttaaagagttgtttaacttatccatccctttttgttcagcttgacggtttacttgctttaattcattttcaaatctatttaaatccgcaactgctttattcacttgcgaagcatatcgctgggttgctgcatcattttcacctaatttagccttattttgatcgtaggcttgtcgcaaagctctgactttttctttttgtgcttcaataagcctgctgagtgtattcattttcgcttgcgtttgttgactagcatttgcgaagccacccattcctgtacttacagatttcagctcattctgtaatgttctaaccgcacgtcctgagtttgctataccttgacgaaaattcacattatcaagggacagcctaacgactaaattattcatttcattcgccatcatcttcccccttattagataatgttttctgctggaacttcaatttcatttgaattctgatttccactatttgaatgatcttgttcacgatatttttggtttagccttaaataatgccagatatccatttcgttatcgatatgatggtgtttatacccctgacgtaataaagagaggtagagctcgtccataaactcgctgaacgttagccctcctccctctacgcgtttgggtttgtttcttctccagttcctggtgtaccaccagccgcatccacagttgcattgataattgcattaattacgtctgaagttgttgataaaaatttacgagcatccacgccgtcccaatattgatctaatgtaaattgttccccgtaaacttttactacatattccttatatagtcgatgttggtgacaaagttgtgattgatacagaaagcagtcatgtcagtattgaagggaaaaacgctattaacataaaagatatttttagtaattttcctgttatcaataaagggacgaataaacttgaaatcataccttccgatataggaacagcaaaggttacatatagggagcgatttagatgagaacaccaagtggaatattacatgttgttgattcacaaacagatcaaattatcggagcgattcaatcaaaggattattggaatgacaataggcattgggagattaaaaataatgttgataagctagattttacggtttttgatggtacaaaagaagccgcagcgcttacgcaacaaaatttggttttaaaagaggtaaggggtggacgaattgttccatacacaattactgaaacagaaaaagattctaataatagatcccttacaacttacgcgtctggtgaatggattttacttggtaaagcaaattatattgatccacaaaaatttgaagcaaaaacagtaggggagtatgtagatatagctcttaagggaacgaaatggaaaaaaggaaatatttcttatgaaagtttccgttctatgaccgttgatgaatttattgatccattaagttttttgaaaaagattgcttctctatttgaactagaaattcaatatcgaactgaagttgtagggaatcatatcgaacggtatgttgatatgatgaaaaaacgcgggcaggatacagggaaaacaattgaattagggaaagatttaattggaattaagcgaattgagaactcgcaaaatatctgtacagctttaattggttttgtgaaaggtgaaggcgataacattattacgatagaaaaaattaataatggtcttccttatatgtaggtattaacaaatagaagattttgccccgcagttaatgtttttagtatttttttatcactttgcctattccaagcgggtgttttttcactataaacactgtccttatcgggtccaactataactctaaattccttcactccgcatcgcttaaagaaattattccactcatacatattgttgtgaattggatttattgttgaatttattttatcgtccacaccccggatttttgtcgttattggggatgatatgtcatcccccaaaaacaaccaaccgtcatgccctacaaccaccttacctgggtcagatgacatgccaattgcatatcctgcataaccgataaatgactcgattatatccagattatagagttttttgaaggtttccgggaaagattttggcatagcatttcgcccaagcgttaaattaattgcaggaacgatcaatagagaaataaaaacaataaccacaaataccctcagcctacatttcattcataaccaccatctttaaaaattaaaatacaagaaaaccgcactagttgtgtgtaatgtcatataaagaccaagcactgtaacaaaagctgttttcattactgtatggtagcccaagcgcgaagatgtaaacatttcgatggagttttttctagatataataaagaaaccaaataatattgccatcatttgtgtcacatattatctgcgaggactcctaacgcggaaaggtttttaatcggtatatcatttatagggacagaactaatcgaatcaatatcaatcatggctttcaaaatattaattgcgtcttgtatcgatgatgctctaaaaaaaacccatgctgtattaacgtacaagaatgtaactatccatgcaagaggattaggcatgctcatgcctaatgctgcaagggctttatcttcaatcttttctccacgtaaacccatttgctctaattcagatatcaggcgatcaaaacctaaaaaatcaacaccatcagccattcattccaccacgcttccacatgattgataaagtgtgtttttcagttggaataactgaaacaatgtcataaattacgttcttatatttaatcttcatatcagcattcacatcagcacgatatcggatttctgtttcaccttgaatttcgctattagctgccgctgcttcaaaatattttcttccctttaaaaaaataaaagagccccatacagtaaaggaatccttgtaaccttctattggatcaccgtccgggctctttgcttcctcgtctttcacttgaaaggtaagacgtttatctaatttacctggattcacttgaatcaccaccacaatattgcaactgaactaatatcgactgcaaactaaatgccaattgttcagcttttccaaccgcttcacggttttcatgccaatgagcaattaaaatacgagctgctaatttagcaagctcgctttttaaatccacatttttacttgtagcatttttaatatatatttcagctgcttctacgaaagatgtaatgagatcgtcctcctcatccccatccacacgaagatacttttttgcttcttctaatgttagtaccaagaagaacccctcctacatcattaagctttggccgtaactgtaatttgaccatatacaaccgcttctgtatcccataacgtaacgtcttcacgttcaattgctcggaattctgttgtattacctctccaagcacttccaccctcttttgtcatatcaagcgataactgctgtctatcccataacacaactgcttctttcaggtccccaagccatttgataggtctcataacccttttgatgaagtttatggggtgagctgcttgagggaaaacctcacgagcagttcttatggggagaggctggaaacggatcacaactgataccgcgccagtcttttacccgacaaattttatttaaaacgtggaagtcattctttcaaattcatcattgtaaaaagataaaagcagaacgattagagtgccatttatatggtcaattgattgccattctactctgttcttctatcatgtttcaaatgcgccaattgctcctcatgaagaaaaaacgagagcttagtgagtataaagccatatatatgattaaagactattttcttcttctattccaaactatacagaaaaacacccaagagctatcaaaggtgttacttcgtctgttcaatcttctacagcaaaacgggcggaaatctcatcgatatgagaaaaaaacggtctttgatatattaggtgtcgtttacaattctatgtctgataatcaagccgcttaattcaaaaaagtgaaacccggtagggtttatttcgtatgcaaatctttcaatcacctatacttgctccttagaaaaaagaaacaatctcgcctaaaattgactttgcataagcttaacttgatagcgatgtggttttacccctatacgtagcctttagaaaaaagaaataatctctactataattgacgttgtatgagcttagcttgatagcgatgtggcggtacccctatctacagctctatcaaaagttttattccactcaatcccataaccattacatttttcacatctagcatctaatttcggtaacatcattaaatcctcctcgtatattaatatttaagtcctatttcagacttagattttttctttaaggctgactcttacacagcctaactatttgttcgaattttatgggtgaaactcccattctaggataatagctcattaatcctagccatgatacccctacatgcgctaacttacacacgagttagggtctgaagttaggtaaggtcgtaacctgatggcacaactcactaatgcctatatggtgcggtggtctttaaaaacattccaatggtgacgaaaggaatccatgttttgaagcgtcgtgagggaatcccttcttaacgtgagcaatcggaaggaataacgggaacaaggagaggctcgaagttctaatccttgcacataatcggtttcgtaattaccgattatgctgaaccagtatgttagagctactcaagactggtgagtaccgtcggcgtaaagtgggcacctaaaggaatgtaaaaataagggatagaacaaatggaacttgggaagcttgcattgccatagggagtgtgatcctgcttgaaacaatgcaagtggcagcggtctcgtagtagtgaggaagcggagtaatgtccgtggagcgaaggggaccagtcgattcagaataacaatggatatttcaaatgtctatatgaacctcttctagagtgggaattaaacagcacatcgttacaatcgcttgaataatggggagacgtaatgaggattaaaggacatttgatagataatgaagcacagctccaagataagttagacctaatatacaaaaaggccaaagaagataactcttcttttcatggcatgatagaactaatgaaaaacaagcagactattaaaacggcaattcacaacattaaaagcaatcgtgggagtaaaacggtcggaattgacaagaaagacgtgaactactacctattggttttaagccgaaccggtgttccggcataacctgttctcccttgttgagcgctttctggcgcagactttggtagactaagggtatcaactgacaaggattaggttatgccaacaaaaaaatttgccgtgaagcactggaaaatggtcgtggtgttaattgctatttgcggcgcgatgttgctgctgcgctgggccgcaatgatctggggctaatattttgtctgcgaaaacgtggcgttaatttactgaataaattttaactatctttacgataatttagggtacaaaaaccggtacgtcataatccggttttcgacaggctgtaacagcgtatatattgcgtcacaggcggcagttgaaatatcaggaccactcacccgccaccagcttgtgtacatcaaatgcgtcattcattgactggccggtagactgagagccgggggcaatgttggagcccgcttctacatcagaggctttagcgatcccgattgggttgttaacgtcactggcaggttgcgtcatattatcagcagcaaatacgccaaatgaaagtgcggaaagcaccatcgctgctgtagcggttttgatttttttcataattttattctcatacttatttaatgcgtttaatgcgataggcctgaggcgagtttttcgcctgtgccgtaagtgtagatctggatcacatttttgcctagtcaaattatttatcaattcgtgtcaaataaactgaataagctctggccagctaattatggagaaattatgaagaagaaaccaaatccattatttattttaaaacgccgtttaatataaataagcacagtttaaaaaattctaatttaaatcctgattctgtaacaatatccaccatgtatgtatctatgagtggctcgtaaataaaatcatgatctattgtgatttgttcagtcatttgattcaccttctatcggtgaaagcgtaataatcatttgttgatctaacacattccctattacagcattcatccatagattaggattcatttttctcattaaaaattcgatgactgtgattaactcttcagtagataaggaaacaaattctcctaaaggttcttgattaaacttaccaccacgtttttcaatcgttagagctactccgttgtcaatcacgtatctttttgcagtaactaaatcgaattgacggactttctcgcggccgaatccttttattagttcctttagaacatcatgaatgacacgaaaatctaacacttttactttctgttcaagctgctctctacactgcttgcataaagtcctttccaaaccagaaatatatattttactcatatcagactcaggaaaaggattttcgcattcataacattcttctccaattacatcttcaaatggatttagcatgtaaatcgctcctatgatttatatttgtttagcacttcttgcaatctctcacgctcttcatcaatagattgcgagttttgcttttcgatttcttttttagttggctcaacatcttcacgtaaccattctggaacaatttcttttctatttgaacgaccaggtcccgaaccattcaatcgcttgttcttactcatttcaaagcgtctatctaatgcagcaacatcatctaatgtttttaagctaagtaatcgattaaaaattctctctttatttcgatcagacggtgctcaccgttttcatcgataacttcacgagcgacaactacaaaattttcttcaggtcttacccattgttctccctctttaatgaggcgaagtgctgcaacaaggtcaggattgagtatccactgtcttcctccgactactggctgaggcaattcaagtactaagtgaataccaatcgggtctttatcattaaattgatactcatcaattgcagaataatacccatccttgtatgcgtaaggagatatggttgtaccaattcctatttcgctccagcttaagctttcggcgacttcacgattctgcggcgggaatgcaactgatccacatccaaaatactcattgatgtagccgatttccttgacgtctccttgcgcattctccaaggattgccgcaggggtatccaagtcgattttgaaaacgtacgtcgagtctctttctgttgaagaatccaatctttatccatttgtcgttaatcctttgttaacataagttatcaatcaaacgtttcgcacttgatttgggtagcaggctatccctgacttgaaatgacgttgactacaaccttgagtcaccaactacatggatccagccacacgcgaataaaccaatgcaataaaaagttatatctccgattttttttatggacaagtctttggtgcagtgtaagtcaatagcatgatcttcttgagtttgctaatggttgatttcatttttacgtgcaatttttatcgatttggctaatcaaccatgataatgttgactaactagatgtatctcaaattcaagttgctgaatttgctcttgccaagatgcaaattaatagtaccagcgatcttaaaaaatatttcaaagatgagcttattcacaaaaaaatgagacttgatcgattgacatgtactattcatgaccaagaatttagcggtaaattaaaactcttccgaaatggtatggctcaaatcgaagcacgagcggaaaaagagttaaccaaaagactatttgacagtttaatgaatatctacatgtaaaataagaggctgcctaaaggcggccttgctttaataaaatagcccccttttcaatataaatcactaattttctatgacttgtgttacatcactctgaattcatgttcaatgtatccttctcagtgcctaaacctagcacctctgcgggtatcacagacggtatttacaccataaccatgatgcccaagtatctcttcaatactagccatcaaatttagagcgcatctggcactccaacggagcggacttgctatcgagctgaaggtccgctgtgagcgacaagctgagctaaaccaataataggaacacagtaatacgatccaatttattgatattaaagtaattgtttaaaatgtgtcattgtagatccccctaaataacgtcacaataattttttctgtttttgttcatagtttgacccagacctaacacaatttcataatctaatggttaagattgatgtgcgaccgaagcgtcctcatgttgaatttttgagaaaggagttccagagtctgtgagtgataaaacccaaattgaatgctgcttttagagcggaagcaccaccactgacttgagctgtagcgctcattgccattgccccagcgccactgattgcagtagtagcagcgccagtaatcatacctgctccaaaaccaccgatcccttgtaaggacgctcctcctacaactcctgataacaacaacggtaatttattcgtcaatactaaaagaataattgacgccagaagtaaaacaataagactattaagatcaggaatatcatttttaataatagaaaaatactgatctataaatgattgcccaatcccaataattaatgtcatcgtaaataactgaacaccaatcgatatgcagaaactaacattattagcatatttatcgcgataagtgccattactactaatactattatcgcgacggttatcataatggtcgaaatcattggagaccaaattgatgctgctgaactgacctttgttaatatcacaaaagccatatcaactatgctggagggtgaaataccagtacttgttcctaaagcatttgctgcaagttgtctcattgagttaattatagattgtgatatggctgggccgttgattaaaagataataaaaaaaaccaatcacggcaaaaaaacgaactatctctgcaagtgcactggttaaaccttccccttgcatcgccaacgtaccaaatgtccaaaccatacttattaataccagcccccagaagagccaatttgcataatcaccaattactaatgaccatgtgctggctacttgctgaaacttatctaataacgtataaggggaagccgccatccggcatgttttccgcgcccaaagcaaaaaaccccgtaccttacggtacggggtttttcttgtttgatgcctggcagttccctactctcacatggggagaccccacactaccatcggcgctacggcgtttcacttctgagttcggcatggggtcaggtgggaccaccgcgctaaagccgccaggcaaattctgttaatctgtatcaggctgaaaatcgtgtctgtctcttcgccaaaacaccttcggcgttgtaaggttaagcctcacggttcattagtatcggttagctcaacgcatcgctgcgcttacacacccgacctatcaacgtcgtcgtcttcaacgttccttcaggagacttaaagtctcagggagaactcatctcggggcaagtttcgtgcttagatgctttcagcacttatctcttccgcatttagctaccgggcagtgccattggcatgacaacccgaacaccagtgatgcgtccactccggtcctctcgtactaggagcagcccccctcaattctccagcgcccacggcagatagggaccgaactgtctcacgacgttctaaacccagctcgcgtaccactttaaatggcgaacagccatacccttgggacctacttcagccccaggatgtgatgagccgacatcgaggtgccaaacaccgccgtcgatatgaactcttgggcggtatcagcctgttatccccggagtaccttttatccgttgagcgatggcccttccatgcggaaccaccggatagccgagaaggtggaacaaattcagtgcaagtcttactagatattgcagaagatttcgaaaaacaaaagctgtatttggcaagattacgttctagtttgtcacaagcacaacgtgcttttgtacagaactgcttaatcgtcatcgctatgccgatagttattatgttgatgtcaaaagaagcatatggatttttagcaggttctatgatggggaaaatcgcgttagcggtaaatatgttcattgtctttttcttagcaacccgtgtagaaaagattgcaaattataacccaacagaaagaggggaataaggtggctacgattttagctgtagtggtattcgttgtcatgtactgggtattctctacctttctacaaagtaaaaaagacagcggtagcttacttacgaactatgtagaaaatgcaaaacgaattgaaaagaagaatttaaatcagatgatgctcgcgcccttccagtcgttatcacataagtacctgacagaagaaaagaaagagcagattcagaaaaaattagaagaagctggcctggatacgaaaccagaagaatatttaaagatgaaggtagcatatcccatcattttcacctctgttttcttgatatgtacggtgttccatgattactacttatttaaagtgggagttttgatttcaccactgctttatttctatcctgattatctattaaagagaagaatcaagcaggcgatagaagctaggaagttcgaattaccagagtatctaataagcacactctggaattttccatccagcccacccttcacttgttggatacattgcatattgcccgtgccattctggtgcaaccgaatcagagaactgagcttgccaaaagtgccatgcagagctttttattttattcccattggaatcatatacaacaaaaaaagattggttggaaaacaaccgtaacactctcccgataccaccatatggtcgatagtcaggaatataagtagtcagttcgcatttattatctcgactccatatagtatcattcttgattgcgttttgataagccatggtcttaatcaccattagcaaaacgcaaaagaagaaaactgatatcaacatgaagcagcacgttttttttataaagctatgcatttatattcacctctttccagtaaatatattcctccatatctaccttattcaaatgaatgataatgttcgtagggatttttttcaccgtcgagtatacgaaaaaatctccagttttattttcgcccttatatttttcccggtatctcacaaaagatgagttagtaactctaaagtatctacagtcaccttcatcaatatattcttttttcaatagttcacttataatccctggtttgatgacaccattctctccccaatagcctaacggttgatcatcaccatcattcataaactcgtaggtatccctaacgtacaatccaagctctttaatttctaacctcataaaaccatcagtatctttcgtgacattaagttctgaacgatgcagtaatcgatttcctcttatgcgctagtgatattggatacacaaaaatgacgaatgtttattttaaagaaaatccatatgcaaaaacgagagagattatagaacttgcacaagcagataaaaaagaagcatctaaaagattacaaacgtacatggagaaagaatggtttaaaggccattatgattatgaatggaaaaatgcgcataaagaacctggatatgtagggtattggagctttgagacagctgcaatagtaaagatactcggacttgatgatacaagtttaaaagataataatcattatccatatgatttggcacattataaaaatgaaatgaaattcaagcatatagacctaagtgaatatcactatgaagatgagacagaagaaatcgaggatatagtagaaggaattgaacataatcctgcattggaaaatattattccgccaaaatggcattcattggtcaatgaattaatacatgactatgagaatatggatgatagtagtttttatgaaaaatacaaaaaaacgataggaataggtcaagtgtggttcttaccacaagagtatgaagaagaaaatgaacaaaaaaatctattaggaagtttaattgtgtttgccctgacggtaagagattatatattacaactggactataaagaagatttagaagactacattgataatcttaaaaatttctggaatgtttcagaaacaaagttatatcgttgcttttccagatgcttcttctcgcactcaaaggagcaataatgcagccctctgaagagtcatcagggtgcaaactgcttttgccatgaattttaaatgagtctctgccacatatatcatttgtcgagtagggcgtgaggctgagggtatattttcctgtgtgggcagaattatgaggggaaccaattgtgtatttccctcgaggtagaggcccactgttttttacacattcttgagatggatcgtttttgtaaccacttgctcctgcataatctgcatcgaactgataaacaccatcaagataaaatttgtgctcttttacattatattcccaggacatactttctccttaagcgcgttccttccaggtatcagaatgaatgatgtttccatctatgtaatgccatgttattttttcatatgttagatctacatattcacaatgtgtatagcgttcgttttgcggtagtttaatgtcaaacatgagtggttcaatttgaactactcttgcattttctaaagttgtcttaaagtaagcctcttcgagcccgttatagttgatcctgtaaaatataaattctgctcttgttagtgtttgtccagtgctcaaggccttgtatagatatgaggatgaggaatcaatctctttcatgaatgcataggtgctactaatacgttttgaagtgatttttccggagtgcttatcaataggttgttcgattgagtgcccctccagataaaacagtattgagtccatcatatcagatggactctttttttactgtctacctataggggataataccagatgcgtactctttttttgggtgattatattccatcttgaacagatttctttacaattacccatgtgtctttctttttaaccgttatagctacattagttccattagattccttataaaagatatatccattgtttgagtttacatatgtaactggttcacctatgcaatctcgcgagcaggatttgttgactagttcaattaaggatagttcacttggatcggttttactggcttctataacagcatcaaggcttgtttttcgataaccttgcaagtttatatgaaaaagctgctctatttctcctgtaatgctagtgttcattacttctactgaattctttttttcttgaagaaagccgttttcataaagtaattttgtatagccaatccatgctattaacactagcatgaaaaacatacccgtcattttaagtattcgaagtcgtttgcttataattgtttctgagtatttcattcactctaatcctccaatgtttttaatttaaaatatgcttggatacatacttttagaagaggatgaaagttaatgagtttttaataaaaaagaaaacatccagggtttaaaatgtaccctatagaatagacacttgaaaaaagtctattctatagggtatttgctgaagagtttccgcgtattacgttttttgaactagacaatagaccagatggatttgcggataatgatgaaagtgaaagtgaaatcacattccaaatcgatatttggtcaaaagggagtacaacagcaatccatcaaaaagtaaatgaaatcatgaaagatattggtttctcacgttatgcagtagctgatttgtatgaaaatgatacacaaatttttcattacgcgatgcgattcgcgaaaggagtggagttataaatggctggagaaattattacaattagttcgactgtcggtgtagatagtcttgtttatgcaaaactattaaaagatgatgcatcaggtgtttcatatgcagatgtaaagaagttagaaggggcagtgaaggttaaaacttctaaaaaagtagcttcagaaattatgtggagtgataataaaaaatcagagattgctgaatctgacggagaagtggaagttgaaattgaagttcgtggactttccttatcagcgaaagcagatattgaagggtatccagaagttacagacggcgtattagatgaaaaacgagagggagaaaagccatatttagcaatcggatggcgtttcttaaagggcaatggaaaatatcgatatgtttggttattaaaagggaagctttcacaagaggaagaagaaggcgaaacgaagaaggataagcctaacttccaaacaacataaccaactttgaccaaggtgaagcttcttttgccttctttccacattctgatcgtgttaacactggagttgttatggcttcttctacagtccacttcaaacgtttaactctgtcacgtgccgtactataactaataccatttaattcagcttgttccgcttgtccatcagttaacactttatttttacattttgaattgacttgttccgccaattttaatgcttgatacttatctataggtggcttactgattgcatcaatcaatctccaacctttttttattcttgctgtataagttgaatgagagataccatttttcaaagctatttctttaatgtttttccatctatttgcgttatatcttgatggttttgtcattgcaatttctttgtcccatcccaaatttctaatcctacgtgtcagtaattcattactaattccattctttgcagccgcctcatattcttctggagttatataataatcatatggattccgcatgagtatcttctcctattcaattgttagttaagttcttgaatttcttttaacgatctattcgaaacttcaatactacgaatcttaaaactataattcttacgatatttttcacgaatttttaacgccgcttcttctttcgtttcagcttcacaaaattctaatttaaatcctgattctgtaacaatatccaccatgtatgtatctatggaagttaggcttatccttcttcgtttcgccttcttcttcctcttgtgaaagctttcctttaagtagccaaacataacgatacttattatttgcctttaaaaaacggtatccaattgctagatagggcttttcaccctcacgtttttcgtctaatacgccatctttcacttctggatatccttcaatgtctgctttagttgaaagcgaaatactacgaagttcgatttcaacctcaatttcaccgtcagactctgcaatttctgatttcttattatcgctccacataatctccgaagctacctttttagaagttttaatttttacagcgccttccatttctttcactgcactatagtcaacacctgttgcatcatcttttaataactttgcgtaaacaaggctatctacaccgacggttgaactaattttaattacttctccagccatctataactccactccttttgcgaatcgcatcgcgtaatgaaaaatttgtgtatcctcttcatataaatcagcaatcgcatagcgtgaaaaaccaatacttttcataattccattcactttttgatggattgctgttgtactaccttttgaccaaatatcgatttgaaatgtgatttcactttcactttctttattatccgaaaatccatctggtctattgtctagttcaaaaaacgtaatacgcggaaactcttcactgaaatcagggccgggtagtaatcaggaataatgaatatttctttcaatggttcttctgaatccggatcgtatatcacgacacctgattcatcgcgcttatccagcgtaaagactttttgtccataaacagtagggttcaagaaggttcgaattaaatgcttgccccattgttccgttttgggcgtcagtgcttgacctgtctggtctttataaaccctctttttaggggccgggtaatgttcgttaagatatctttggattccaagaagagtttcaccgttttgtttcagctctataatcttttgcgctgctgcaaaatacattgagtgtggggtaacgtatcctgattttgtatctacccaccagacatgctgacccacggattctattgcttttgctggcgttcccgcttctcttgtcaggttgtgccgtatcagtgaacgggcttgggcttcaacccgattcttttttgtcaacgattcgtcgtgggcgcgtgtgaacatcaacaatgaaatgattaaatcggttggattattctttacgtccgcgtacttatagaccttttcatccatgccagtaacaacaactatccccttgctaagtatgctcttgaatatatccaaagcggtccaggcatcatcacgactaatgcggtcaagattttcgactactagccacgaaccaatgggaactttaacccccttttatagtatatgtattgaagttgttcctccctaatttataagacattccccagtgtcttaaagcagcttccatccctaattaaattgacataaattgtccccttccttgaccatcttataaatgatggtcttattttttgtctttctatcttttatttaaaacttccactctctttcactctatgttcacacagaggtcacatctaccttttatagtatatgtatcgaagttgttcctccctaatttataagacattccccagtgtctttgaacagcttccatccctaattaaattgacataaattgtccccttccttgaccatcttataaatgatggtcttattttttgtctttctatcttttatttaaaacttccactctctttcactctatgttcacacagaggtcacatctaccttttatagtatatgtatcgaagttgttcctccctaatttataagacattccccagtgtctttgaacagcttccatccctaattaaattgacataaattgtccccttccttgaccatcttataaatgatggtcttatttttttgtctttctatcttttatttaaaactccctctctctttcaccctatgttcacatgagagtcacacctaccttttatagtatatgtattgaagttgttcctccctaatttataagacattccccagtgtcttaaagcacccctgcatttgaagatcgtatagagcgttacttctggcaaatctcccgatcgtagacgccaccatttacagccagcagctgtcttttcttttttgaaatcatattagtcatgatttgcgaacgatctaaaaaaataccatcaaatgttcctggacgtgcattccgtcctgcaataattgctatatctcccaagtttaacgttgctaccttatcgttatcataatccgtattttcgaaaatgaattttatcccttcattcgaatcagggatatataacgttactaacggttttttactgaaagtgactgtaccgatgcttttaattttaccagtaaccatcaagcgacatttcttgaaatcattcgttgccctgaattcgtgttctttaaacttcgcataaacttccccggtagtatacacccttggaagtatatcgattattgatggtttggatagttgctctttttgttgcaaagaagttgagtctctgtatgatacttgtattgattcatatgtgctggcttgggttggtgttattgctaaaccgttcaacatataaatcccgaaggagatggcaacagttacaatcgtttttttaaagtgaaatttagagtctgctatcattttgcttttccataacttctatcttaacaatatgcttaccattacggtatgtttttacgttatcagtgggagaaacggcgaaattttgaaaaggcaacccgcaattatctgaagttatctttctttgaccttaaccatgcaaatcgcgcttcaggttgtaacaaatttgtttcttgattaattttattaattaaatcaacatcatcagttcttaaaaataaattaatttgtcgttcatttttcagaattacggggagtgttttttggttttttgcacgtaactccttcactttcaggtaataatcctgaatcgcccgatcctcaggcagcacgcttgcagcaaacttcatattccctaatgtatactcatgtgcgcaacaaattacggtgtcggctggaagcgcattaattttttgtaaagattgatacatctgttctggcgtgccttcaaacagccttccacagccgccagaaaacagcgtgtcgccacaaaaaagataaggtttgctgtagaaacagagatgaccggaagtgtgacctggcgtagcgaatacggaaaactcccacccgaggatgaggatactttcgccttcttcgacaacttgcgtcgtacccttatcctgtgcctctgccggtccgtagacgggaagatgaggatagcgcgcaaggagatcgggaacaccgccgacatgatcgtgatggtgatgggtaagtaggatcgcttcaggctgccagccgttttcttttatcgcgtgcaggatcggtgcttgatactttcgatggtaattacattgtcgccttcacctttcacaaatccaactagtgctgtacaaatatctcttgaatgttcaatacgtgtaacgcctatcaaatctttcccgagctctatttctttgcctgtgtctcgaccacgtctttgaatcatatcaacataccatccaatgatttgtgatccttgaacctcaacacggtactgaatttctaatttgaataaagaagctattttctttaaaaatgttagtggatcaataaattcatcaatggtcatcgtatggaatcctgcataatccgttttcccacgtttccatttcatgcctactagggccatatcaatatatttgtttaccgtttccccttctattctttgcggttttataatacctgacttagcaatttgaacccaagctcctgaagcatatgtggtaatggatcggttgtctgaattcttttctgtttctctaataacatatggtacaattcttccgtcacgaacttcttttaaaacaagattttgttgttgtagcgtagccgaatgagttgttccatcaaaaacagtaaaatccaacatatcaacattgtttttgatttcccactgccttttatcatcccaatagtcctgcggctgaatagctgcaacgatttgatctgttttaaaatccacaacatgcaaaatgccgcttgatcaatatattcaacatagccaatcatctccggataaacggcaaccgttccgtttggctgttcattgttctcaagccatggatatccgtctaaatatggactttttgctctttgaataaatgtttcggttgctgcctgttccacctttgctgtcgtctcgccaacccttcccagagaggtcaaatgctatatccaacgaagcaatgtgatgaggattaaggcaatgaccaccagtgtgacaacgaataaaatgactctgcccctttctccgtaggctcccatattaagggcaatgattcctaccaggctgaagagaaatgaaccgatgaaggtggccaatacattttgtgtggttacgtcttcaacaactaaacgtgttgctcttggcgttatgctgtgaccatgatgctcagcgaaaaggtggtaacagctaacatactcgatgccagtatgtttagaatgttatccactgcttctgcgccaaccttaactgataccgactcagggatcattgatttaaaaagaatagataatagagcagttattattgctacaattgcgaataacgctgccctgaaccatagttttttaaatatttgcctcagaatccattgccaacgcgaaatcatactgcattccctcgtattgtagccgagaaaaataaatgccgcccttagagcggcatggggatgataactatctagcaatgatgcaaattcaagtttctgaccctgtaaattcacaagcaaaagttttgcccccatcatcagttcaaaatgaagattcatcgtacaaagaagtgtttatgaaagctatccgtggtcaaaatttaagtcatgaagaagcaagcgttatgcaggaatacaaagcagcattatctgagaatacaggtaaagacggaggttatattgttccagaagatattacgacaacgattaatcaattaaaacaaacggttgataacttagagcaatatgtaaatgtgcaacctgtttcaacgaataagggagctcgcacattagaaaaacgtgcagcatctacacctttcgctccattatctgagtatggaaacccaaatgcaatgcaagaaattgcttcaccacaatttgatcgtttaccgtatgttattgaggattatgcaggatttctacctgtaccaaatgatttattaaacgatacggatcaagcgctagaagcttatttacgtcagtggattgcgaagaaatctattgcaactcgtaattatttaattttacaagaaatcaataaattaacaaaagttgatttaaaggattataaaggcattaaaacagcattaaatgtcacattagacccagctttctcggctgtagcaaacattattacaaaccaagatggagtgatccaaccttatccgggaggaaactccagtgggcatatgacaatgtatgatgggacacaatggatctccgatttccgacagcgcagcatgtaccctggtccagggtatcgcgcagctcaaccgactttcaaaatatacaggatgaattgatgcgagccgcaatagtgttaggcgtatgcttgctctcagcttgctcagttaagccggaacagagcgcgccgacgcgagtacattctttttacgccacgtatctgatgtcacttacaagtagcgacaatgaatattcgccgtctgatctgcgcgtatatgtctctgctgacacgattaagagactggatgatatagagtcgatacccgaacaagacctgcttggatctgattacttcgcttatgcgcaggactatgatcccgcctgggtgtcggcgttaaatgtcgggccagccaaatcgtttatgggaggtgaggttatgccagtctggatcgggagagaaaacggcggaaaagtagagttgcaggtattcgttcgtcgtgaggctggcgcatggaagatatacagggttcgtgatgtcaccgacaactatgagcatcccatattcaatgccggagcaattgcccaggcagaagttgcagccgaaagcgggctttaaacgttaaacaggaacttagcctcggcaactgccgaacggtgaatttttgtgatatattcttccgtaggcgaatattgtataaccgctgtgaatatagatacaatttcattacggtaaggagcaaattgttcaatacttgccactatttgatcgtcgaaatcatcaccttcagtgacaactctgaaaagctcgagtttttcaccaaacagtgttaagtattcatccagagcccccggagcaaaaggtttgtgttctttcaatgcagagagtgtgcgccttgcagccgccgttgtctcgtagacttcgcgtgaaataatttgggtttcggtaccaacaccgccagatcgaccatcggccctttccgcataaagtttgtcacttacaatgacaactttctggatctcaggctctgtaaccattttctccatgaatgccacagcatcatgaccttcttttagatcccatttatctaagatcacgtgaataccggactcggtcagttcctccgcaagcttaaccactttttgttcgtgatcgggactggaccaactataagatataaataatttgggatttgacattttcaattgccttacgttgaattgatggtcaattaccttctgattctaccccgatttatacccgataaggcaagagtaaagtctggaacaaaggacggtacagattcaggaaaagacgaaagataaaaccagaataacgttttttgacacttgggggtagtgcaaattcttaagttgatgggcatgtgacggtaccccatgaataggatattcataataatagttccaaccagatagatatctcatgataaaatagaaataaaaggaaagatggtgaagatttgaaaaaaccattaaaaacttcaacaattatagtaaccattatcaccattatcgcttgcggaataggatttgatttttacaatcactctttatctccagatacaatttatagtacaggtattataattattatttttcttctttttagtacaagtattaccgacaagtctaaaaatacttctaagccaacaaagaaaaaggtcccagcaatattttggtctaatatcctcataatgatcattttattcgttgtaattagttttgtaactacaggtcatatatccattcaaaatctaattttatttatgtgcttaattatatatggtggttttgttattattagcattctatcaaagaaaggcaagatatagatttattaacttccgagaacgagaattatgtaaataagctgtccatatgggcagcttattatttttttgcttagcgtggtttttttccaaaatgctggcggtaccccatccctatcaagctaatagttttaattaccccataacgaaatttttagttgacatggcatcccacatgctgtttaccccattcgcaccttctttgaaaagaatcgttgcaccacgtacagcatccgatccgaataacgtttccaaagccatacttcgttgctggtctgttaaatctttcattgattcatgaagtgttcctgaaatattttctaagctttgaatatgtccttgttgatcatagaattttgatgataggaacgctgaacttgtagctaattcacggaatgttgtatcacacttgtcattccactttttcgcaccttctattttcattacatagccttctaaagcttgctcaatatcaccgacgctccttgaagctggttgtataccgtttttaacaagaaaatcatagccagcttgtgcattataagtaattaaccctaaatccctcatttggttatatgcttcttttgttgttggatttaatcgcataagcattgtttttaaagaagtacctgcatcagaaccttttaaaccattttgtgcaaaaaccgctaacgtagtagctgtatccttaaatgtcattccagctcctgctgctactgctgatgaagctgaaagaccgtattttaactcccgtacatctgttgctgaagcattagccgctccagataaaatgtttgctgcatccgcaacagaaagatgatctgctttaaatggtatccagcttctcaagctgagcagtgtatttttcaatcagcgtctcggcattttcaccgggaacgaaatcgatccagccgacgttttcctgctcgcccaacagcatttctgccgttttgagtaactgctccgcagcccaaccatgtgtgcctatgacaatagcaatggtcacttgctacctccttttattatcatttatacgtctgccaggcaggcgtactgagaatcgtattggcgaaccgaatcgattcagataagggttagagttcaaaaaaactaagacttccgcgaattattttagatagtgaaaaaataatttatgtgatgaagatccgtaatttagctacgccttacagatttttctctaagataatccgcgtgtgttacagaagtttgcaaaggaacgtaaatctttgctaaaaaccaattgtctctgatatgtttagcgtccgtttaattattcaggagtatagggctacagcccactatatggaccgtcaccgacgtcagtcatcttccaggccattccgcgccttaatcaccggcgatcttcgccacgcatcgactctcattccctttgaaatgcccgacattagcggggcaccgttttgtcattcctttagcaggagcgtgtcatggaattcttaatggacccgtcaatctgggtagattgtgaaaagaaacaaatagaggcgattcaaaagaatgatccattgttactttgtacttggattaaagaagcaagattggctcgacgggagcttatagcgctataccgtgagaaagaaaaatatgatacccaacttgaacgggatcgtaaaagcattctagggattgtggaacatttgaaaagtagaggtatcaatgcttcagttgtgaagagggcgcatcataatacgctttctgaagagtgctgttaaaagtaaaaaagccctataaaataggacttcttctgtacataggtcatactacttgtttcgtgcactgacattcatcataaacagtatatcagatatattctgaattatcttcatgtaaatgctttagaatgacgaaaagacctaaaattaggtcttctcatcggcaatatcagtctagaacagtatacctaacaggagtgagttaagtaaccggaatgctcttatagtatagcaaactattacatttaaaaacaagaagggatggtaaaaggaaatgacagcagaagaattatttgaagaaaagaaatatttagtgattgcagcagttaagcaacaatttggaagtatcgcaagagctggacagattgcagaaataaacaatatggatttggatgatttaatacaagttggccatctgaatttattgagaaatactctttgcaggggatccccggcgtagcggtaatgctctttttcttcgtttcgatgattgcgtatgccctacgaaacagaaacgcgctgctgctaacgtcaatgcttcttttgcttttgtatggactgacggatgtcatactgctcagttcagaagccttaatcttctttatgattttgtttgcgttaagtacacctttctcacaaacaaagcagcaataacaaatatgcccgcctggcgtgcataactattttttgtactggtaaaacgccgcaagcgtcatccccacggtcttatctgataaccaggtaaagagctgctccagatcctgatacagtccctcaatcgcggcctggtctttaaaagtagggctgccgccaggcataaattccgacgaatgcagcatgaactctacgtagtcattcccctgagccaggcactgctgcgcaaccttaatcatctcctgcgcgttaccgccggacgggcgtaaccagttaactgacggagaacggtatttaccgcgcagatgatcgtaaccctgcttcagggaattcagccatgccgggtgtttatactggatactcatcggcacttcgaggagagggctgtttcccggccgggaaatgtcgtctacgtccaaaaaataggccttgtgaatttacagggtcagaaacttgaatttgcatcattgctagatagttatctaattcatttttcgcgtttttcgcttcttcaattttcgcttttgcatcttcatatttaccgctgttattaaactcttccgctttcgctttcaaatctgcaactttttggcgtaactcttgttcacgtttatccattccgtatttcctccttgttttggcacaaaaaatagacctataactctaacaggtctagtgcattttgtatttttaattgttcgttattatccttctttgaaatagaaggagcctttgctacaatcttatttggtgttttttgatatttatcaaagtaatcactgctacaagctgcgacttcttttgcttccacaacttcaatattgaagtatttttcagcttcttcaccacttaaccaggtctcagcatctactaattgctgaattacttcaatttcgatgccttctttcaagttttctttgtatacattcataattccagcctcaagattatccaagtcctctgccattttacgaagtacatttgcatttcctctacttacagtccatggtttatggaccattaaaaaagcattagaagggacaacaacacgatcaccagccaaggcgattacggaagcgatagaagctctattaaactatctgatcctaactctatagaatgatgctttgttcctacatattcagccacacgtttcacccaaggttcatcacgatcaaaacgaaggaagtcttgctcaaagtctttttcatcattgatgaaattcagagaatatgtatgaagacgttcccctttattcccaaattcgtttcctgctaaacctgttaaaccactggaatctaaacctccggaaagcatagataccactggtttatcagcaattaactgacgtttaaccgtatcttgtaaaatggagcggattgtctcgactgttgtatcaatatcatctacatgttttttactttcaagtttccaatactgtgtcgtagtcgagccattagaggtaaacgtcatataatggccagcacgcacttcatgtatatccttgaaaatagcatgaccaggagtacgtgttggtccaaggcagaatatttcagaaagtccttctttatctacctcagcatctacaagtggatgcgaaagtaaaacttttaactctgaaccaaagagaattgcgcttcccctttgagcaaaaaataaaggcttcacacctagatgatcacgaccaagcatcaatttcccaaatctttcatcccaaataccaaaagcaaaaatcccatttagattttttcgttaattattcataggttatgttgagatcaagggtaccgctatgtacgataatctgaaaagtctgggcattaccaatcctgatgaaattgatcgttatagtcttcgccaggaagccaataacgatattttgaaaatctattttcacaaggacaaaggagagttcttcgccaaaagcgtgaagtttaaataccctcgccagcgtaagaccgttgtcgctgacggtatcgttcagggatataaagaagtacaggaaagcagccctaacctgcgctacgtgatcgacgaactctatcaaatctgccagcgcgatcgcagcgaagtcgatctgaaacgtaagatccttgacgacctgcgtcacctggaaagcgttgtcaccaataagatcagcgagattgaagcggatcttgagaaattgacgcggaaataagttattccggtgcggtctgatgccctcaccccggccctctcccacagggagagggtgaatatcaacaccgggcgatacagcatcaatcttccagtgaatacggcagcggctcaatgctgagcgtgtttgcatcatcacgcacgcggaacacgctgtcgggctccatatcattattcatgacaacctgcaccagcaggcggccatcatcgagctggacggcgtaaccattcatgagatcgagaacaatacagacgaactgaagtttagcaactgtgtagaagaggaagtatatccaaacaacacggtaacgtgtaatgattatactgcgactcaagaagaatatgagggtacgtacacttctcgtaatcgaggatatgacggagcctatgaaagcaattcttctgtaccagctgattatgcatcagcctatgaagaaaaagcatatacagatggacgaagagacaatccttgtgaatctaacagaggatatggggattacacaccactaccagctggctatgtgacaaaagaattagagtacttcccagaaaccgataaggtatggattgagatcggagaaacggaaggaacattcatcgtggacagcgtggaattacttcttatggaggaataatatatgctttaaaatgtaaggtgtgcaaataaagaatgattactgacttgtattgacagataaataaggaaatttttatatgaataaaaaacgggcatcactcttaaaagaatgatgtccgttttttgtatgatttaacgagtgatatttaaatgtttttttgcgaaggctttacttaacggggtaccgccacatgcccatcaacttaagaatttgcactacccccaagtgtcaacatcaagatttacggaaaacctgacctggttgtgctctattatcagacaaaatgcgctgccaataacgcattcaggattttgttctgacattaatagcaacgcctggtcctgatattgatttattatttcctgttgttttgctggcgactcgctcccgaaatagagggcatcgcaccttgctgtgagtgcttcccgatcgctatgcacaatgacaggactatagggcaacgggttgtgttcatcttcactgctgagcgcctgtctgtaatgggaagaggcataaatacagagcttaggctggccagacagtgctggccatcgggtgtagctcaatgaacagcattagcgccagggggagtcggagcaaagcgatcaagattgcatttctcatcagaatccgccaaaccgccccggaaatagatgtccttaagaattgtcggcagaataccattgtttatcaaagccgtcattatgtcagaaatatccctgttttgacctaagctaaatcttacagtgagctatattcagaggaattaaggcaggctcaattaagcctgctggaacgcatactttcatccaatccttgttgccaggattcatgcagttttactgcattttcagttgtatcgcagctggcaggaaatggctgattggatttagtgttactaacatttattactttgatttagcattactacaatcttccgtgttattaatttgtcagacgtttgccgtcttcgctgcctgtggcgtcatccgtctgatgctgggcaaacgctggcgacacagcatcccgaataagtacatcggtatacgtattttctggctcggatttgtggttcctgtaggcatcaaattatcgatgtatctggcgggatatttatttgattttccggtgacaatctcctcctatttcggcgaaggctctgcaatttataacgttatcgatattcaaagcctgatttgtgccgccctgattttcaccatgatgttctactacccgttaagaatgataattaatccccggtatgcccgaacattctggcggcgaagcgtgaagcccctcttttgtcacaaaaaagtgttatttatcgttgtgtggctgatgctgttggtctcgatgatcgctattttgtgcgcgcctttcgagtcacagtttattgctggttatttgatgccaatcgtttttattctttttaccctggggattggtcgtctgagctatgcgctcatctctttactctgggcggcctcggcgctcatgctgttgacctacaattataattttctttatccaattcgaacagtttcccaattaacaagagaaatttatacaaacccagtattagaaaattttgatggtagttttcgaggctcggctcagggcatagaaggaagtattaggagtccacatttgatggatatacttaacagtataaccatctatacggatgctcatagaggagaatattattggtcagggcatcaaataatggcttctcctgtagggttttcggggccagaattcacttttccgctatatggaactatgggaaatgcagctccacaacaacgtattgttgctcaactaggtcagggcgtgtatagaacattatcgtccactttatatagaagaccttttaatatagggataaataatcaacaactatctgttcttgacgggacagaatttgcttatggaacctcctcaaatttgccatccgctgtatacagaaaaagcggaacggtagattcgctggatgaaataccgccacagaataacaacgtgccacctaggcaaggatttagtcatcgattaagccatgtttcaatgtttcgttcaggctttagtaatagtagtgtaagtataataagagctcctatgttctcttggatacatcgtagtgctgaatttaataatataattgcaacactctcacttcacgtctaaacgcttatagagaaacgtgtcgcgcctgaagcctgcatcgggtcatttcctgctccacctgattcctgcatcatttgggcagccaaaataccaacatattgagcaacaccatgtttttctgccatttctttaatctttggaagatatcctgtaacttttgcattaagattgacaggctccccgccaggactcacattacctacacacataccaccaacaaaattactagaaggtgctagatgtccatacataccttctaacatcccggcttctaatatctcacgcgcacgttctttttgacttttactaaactttgcgagttccatagctttctctagtccatgagaagatgttgtcacttttttgcttccacttgcattaatctcatctatttttttcttaaaatctgtatctcctactatcttttttacatctggtccggagtaactttcagattttgttttttgcatctcttttttctttttttcacaaggaccattcggtcccgcctcacatacctctttttctgtatattcttcatattggatatccaataaatatgatatagcatcatgcggatctttaccagttaaatcattatcatatcgtggcgcgtgataaaagcaatccgtacgggaccggtcctggtaaatcaacttgctgcggaagcatcagcggggataaggcagaaattatctggactgtagattacacacttgcgcaatacaaggcgggggtgcgatcagaagtccacaaaaaaatattgcccatgccgcaacgtcagtggggagaaaattaccttcatacctatttcctgcctgaagaaaacgtccggttatggtggagtaccggttttaatcatcctgattctcgcgatattaaagaccaaacctcagaattaaaaaaggataaataatatatggatattgaaagccttatcgccgcggcaaatcgggcccagcaggcagaagatgctggtttagggaactgttcgcggatatggcatgttggcttcttctttgacggtattcacaggaatatagaacaggacgcagcagaacgtcgacttagcaatattgctcgtttgtttcgtgcatttcctgatgatgcgcaaaaaacaagtaaagagtactactcaaagttttacatttctggcctgggtacccctttccatgaaaccattgctgaaaagcttcacaccatcatggatggcggcctggacagcataatttttgtataaaaattctatttttttatattcgataccaaccacgaacctttttaaaataatagtatcattatgtctcctttttagagattatttttaattaccttgaatttttcgcaccagaaccggaaaattcctgactactcgaaatatcaactattaagtgctaatattcaataacgcgtactgaaaatgattaaacatttttataaaccagtggaacatttaagaaatcaatttttctcttatcgaaatttaattagcttacagcaatacagtggtcatatatttttaagaataacggaagaatatatagaaattgctacagaaatgtgaagtttaattaatttaggaggaacaaatttgtttaatcagcttgtaaaagttataccgaatttatttacgattggaaatttattgtgcggtgttttctcaatcaccttgaatatgagtgaatatttaggagcagcctccattctcattttcttttcagctgttttagattttcttgatggaagaattgcgagaaaattaaaagtgaacagtgagtttggcatagaattggattccttagctgatattgttagtttcggcgtcgctcctgcgcttttatttcataccgataatctccactccttcttgtttatacgatttatttgtaaaccaatctaacgatttgcttccaattaattcatttaaatcacactttccaataccaggtacattacctgtttcagtgtattgccatatatcgcatggataatccggtttcttccctccataacgtggaatccacacaaagtcagctttcacattcgccataccaaatggaaaatacatatgatggccaacatataaaccaactttttgagcacctaatcggcgtagttcatcgataaaagcttgtgttcctgctctcatatcatccattgtttttacttctacatcagcaacccagaccgttgcgctcttgtctccgcggttccaaaagtctcgagcttctatacgtgcatcattttcagaaacaaaacgacaaaacgcatagttaccaaaaggaattttatgctgcttcatagcttgtacatatcctttatatagaggatctacataatttgaaccatcttgtacacgagcgatgataaaatcaatgtattgttttgccacgggccaattaatatctccattccattttgaaatatctacagtgtaacccattatttatcctctccttcgctatgacgaactgaaaacgaaaaaactttgctcgcatatttaattcatagatatttcatatcgttaaaaagttgcaccgtttcaaacgagttgtgtgataaaaagatgtttagattatgtttgaaattgttgtttctgtgaattttttatttcgcgatttctgtatatttttaatcctttttactcttaaaatctttttgcttttgtgcgcaaatgaaaaaatcaaaaagtcacgcgtaacttttattaaatatataaatatattattaaaatacctaacccttttatgatgaaaaaatataaatagttaaagaaaaaagactgataaaaaatatcagtcttttttctttagttttatttataaagagtatctctttatggtgttttctactttttctctccagttctctatatcgtcaattgatattccgatctttattaattcgtttggaatgaaactgttatctaaaatccataaagtgagcctttctaatgtgattctttcgtttccaatcgaataaatacgttcactttgtttgcaggtatatggttttttaccaacatatttttctacataaaagtatctttttccgtttgctttgtaatttgttaggtattcgtacagctatcaatggaattattcgtatcataaataaatttatagatggttttaatacaccagcagaattattaaacaatataccaggagttagcgcgccgactattccacatgtaccaatgctcgctaaaggcgggaagcctgtaggagatggctcatttattactggagaaaaaggacccgaactgtttactaaaagagggaattctatcacagttacgccgttatcttcaaaagaaagatcactcggtatcactggaactatgaatcaactaatgagtgatatgagccggatgatggctagttcaatgagtcaattatcagggttaaagagtgttatgagtggtgtgtatggaaatatgtcaaatagtagacaagctatggcagctggtgttgcgaatcaagtgattaattattcttcaggatcatctggcggtggagtcattccaacgcttggtggcgatttagttgtggaggttcctgttgttttagagggacgagatgtagcgcgtggtacgtatcgctatacaaccgaatatcaagaaagagaaacacagagggattcagacttttaagtttgagtctcttttaatttgaaaaggcgcgcgactttgacgaccagagataagtcaccgggaggcacccggcgccacatcctcaaaaaaacgttttgtcgaccaccaagttctgaatcgtcatatacacttctaaatgaaacaatttaagaggtgaattatgaaagagggatattattggattagacacaatgactgtgtccagatcgcctacttttcgcacggtaaaactgaagatatggttacaggaaaaataatcagaggcgacagcaactcaagggcatgagcgtggccactccgggaagtggcaaagaatttttagagcctcgcatatgcggggcttttttatttcccctcaaacttactgagaggattcacagcaatatgaggggggccgatgtccgatccattttccggcacggggctggccggtttagctttgactggagccagtgtctacggtctattgaccggaactgactacggtgttgtttttggtgcatttgctggcgccgtattttacatagcgacagcagctgacctgagtgtgttacgtcgcctggcatacttcttcgtgtcgtatatcgtcggcattctttgttcggggctgttgggttcaaaactcacatcccgtacagacatacaaaagattggctggctaatctagccagctcaacccaactttgcaagaaaaatatgcgaaataatcagccttggcgctgtttatgcttcggctcggcactgcaaatcacacggatgacaccatcacgcttaacgattttgcagttacggcataatttcttgacggaagcacgaactttcatttttactctccgtaacttctcaggcgaccagttagcggccgtagcctttcaggttcgccttcttcaatgcagactcatactgactggacatcatcagagtttgcacttgagccataaagtccataatcacgacaacaacgataagcagtgaggtcccaccgaagtagaacggtactttcattgcatcacgcatgaactccgggatcaggcagataaaagtaatataaagcgcaccaaccaaagtcagacgagtcattactttatcgatatacttcgccgtttgctctcccggacgaattcctggtacaaatgcaccggacttcttcaggttatctgctgtttcacgcgggttgaagaccaacgccgtgtagaagaaacagaagaagatgatcgcagacgcatagagttagatcataatttaatattatctaaaagaaataataagcaagagctggataaagtaagtcaatctctaaaaaattggcaagacgatgatattctaaaagacatgtttagagcaggctctcaacctaaagtacgctatgagtggctagaaagagagatcccaagactgcaggatgaactgaatgcatttcaagttcacgagcaatacagagctattgagaatgaaacaaacagtttaactataaaattacgagaagttgaaaaaaacaaaaatatagctgaatttaaagtaaataatatagaaaaaactttattagaacaccctgacatttcaagagaagagcttcttgaactgtacaatggcttacaagagattttcaagccagaaacattggcccattttgagtcagttgaaaattttcacaaatcattatcttttaacagaaagaaaagacttgaaaatgataaagtaaaacttttgttagaaattgaatctcttaaaattgacattaaggatatttcagcattacgtgattcatatttggaatccctgcaaggcaagaaagcatttgatgaatacgcagtcatagctagacaaccgggcttggctctctataatggtgttactctcggtgccagtgtgtacagcattgtaggactcgctcgaaaaactggagcctggagattatttcgctggcttccacacgattactatcgcaaagtcagcacaatgagcactcctaagctaacaatgaagattgtcggttatggtgttaaagcaaaagtgattttcgatctattgacaaccgaaaatggaaccagttaatccttgatagtttttcggtaacgccaggatttataggaaattaccggcggctgcgcgaaggacataatggcaaccccaaagatcatcgccagcccccatgcaactgctctatcaggtgagctgaagacgataagtagcagtaggattaaggcacacacagccaccactcccgccaaggtaacaaatcgcctagcgaggtcatttatggcctctccaagcgttcctccatatttttcaatgttgctttttatcttctgcaattcgggctgcgtaaaccctgaacgtaacaaagcctcatcagtcactttcatatcgtctcgtcgcttatctcccagaagtgttttcccaatcgctgattgtgcaagcaatcggctcgggttgacggtatccggcgctttttgcccttctttgataaaagcgtatttctgggggttccagataacggcgcctttttcgtctttaatcaccgcgggtggcagcgaggcaataaagcctttgtgcgcatttcggaaatcggtcttatcaaagaagggcagttgaccataaagtgcatcattcatctctttcgtatgggcagtggctcccttcccttccttttgtgccaggacaggcaatgaggtcaacgagactaatagcagaccagcaacggccatcgcactaacgagagttttaaatttcatacttcctcgaggagttatattcacgctggcggtacatggggggaaaggaggctatcaccaggcttatctttaacctatgaaattaatgtttataaataaataagttaattctttcgtcgctgcggccttcagggataatgctgagtccagttatttccccggagtgattcgatgaagagcctgccgttctttttcgctgtattaaccctcagcacattaacagcctgtagttctccccaaccagacaatgttgaaaaaattaatcatctgcaaattccactggtgttcttgccctgagctcatcccagtgcatcttaccgacgccttgatgggtattttcttatcggaaaggccagtgcccgctacagatgaaaatgaagacgcagagattttaccaaaatccacttcaatgatttgaccgccgttaacttcacactcctgcggcgcggtaatatccccttgaataaaaacatcagccagtttattgccatagtcggtggctaatacactagaagtattagcatacagcgaagcgagtaacgtcaactggggttgttaggccggtcctcaaagggaacgttgatataaccgcgccccatgatcatgatcgacaatccaacatctaaatactcatctaatacatagtattgcactttatttcggctgacgcttttctgcaaggcggggttatctttggctgtaaagtaaacatagttataatcgcgattacagtggcataccccttcatactgaccaccgttatctacttgtttgctaattgtctggccagctttattctgtgaggcgctgagcgtagtgccggaaaacgaaagtatgctgtggtgtgtaccgcctttagcttcgccatatgtatccgcagcaccggtaactaacatatctgcaatgacgggattatcacgcaaccagggggttgcctcgatacctgatttctttgcggcgtttttggctacatcccccaccagtgatttccactccgaagggcttatcagttttttccctgagtcctttaaaacctcccaccagttaccacttttcaaataatccaggccagcatccttcgcaatttcttttggctgatcttttaaatcattcaatgcagagctttgtgcactgtccataatggtatgcagtttctcagagagttcttcattgaatggtgtgccaagccccgaaaaatacaaagagttatagctatactgatcggcatttttttcttcgtccggaaacgccctgaataggcgcgatacgttgctaagacgtgcctctatagcatcctggtctatatttcggtgaatcccatcaaaaaagaaaccgacatgccaaacacgcgaacaatttcccaacccggcatcatcagcctgctgtgcacgactggcagcagcaataatactttcgatatccatcaattttgcccctgctttacagtcttatctggaatatcaggacggtgtaaatttaattccagaaatgattcaaatgatggatacgcttggatacacttctaaaattgtgtctcgtggagatcgtcaagggcttgtatattttgaaacggattatcgtcaaggaaatgaattagataaagtaactgcgtggttagatgcaaaaggccttaagtatttttatacaaaagaatagttttacgaacagaaataagagccgtcctgtcgggcggctcttatttaatttatattcactaattcatcaaacttaaattctgtgttgagaccaaatgcatccgtacaatatacgatttttaacattggttcgatgtgtagcacatttatgtacatgtcctgtatcatgccatcgcgatagtaagaaattgatatttcttcatgagtttgcatggatcgaataagactatgttgaatttgctctttcatatcttcagaaactattggtttcggtactttatttaagtcattaagtatttctctaattcctgcaaactgttccggcatactggcaaatggttgccacttcaccattttatcaagactttttttcgattattgtagcgatattaatgcctctaacaaatccaccatgtacaaaaagacttgccccagtagctgttgctgctatatctaatggaataacaattggtgacgctaatccgccagttcctacttctgcgacgatcgttaagaaattagatccgcctatgagcgaaatagcttcaaacatttctacaatggacccggctattgatataacatttccagccaaccttccagcttggtaagttgtcttactttctaatttatcattctcatgtggttgtagtccaaaaaagttttctagtgctgcatcaccagcaccttgaaaaaattcgataactccatgcaaaaatgtttgcgcataaatggctgttttttcatgccatgatctattgtcttcctgttcttgtaagttcatttcttgtttgtgcaaagtaatttctttcatctcgttttttcgagctgtttcttctataatcccctgaatcgaactcacccaatccatattcaacccttgtgtactaaacgtcccactcacaggactaaatcctttcccgctttgcacttcagcgagtccggctgtgatgctagccgctaattggagggcggtgctgtaattcaagtcttataaatatcatgctcaaaaagtttaaagcgaacgaaggtggggttttaaagcataatcttttgaataaggcattttctaaacatgtaactacagtggaatgtgttaataaaattaaggggtttattaaatcattacttgatgacaatggttatatgagtctttcggttaatgacttaaacgtgttaaatgaaaaaataaggaatggtgttaagcttcctaaattcgataactatgattggtttaatggtttaggaataactatccatgatacttattccacgcaaatttatcttaattatatagatgttagtgacggtaaatttaaagccgaaatttcatttcaaatacaggatcactttggtttagatgttgctgatgttaatgggaaatggtttgaagactttccatggttttgttcatggttcattcttcagcgttatacggaatttggatatatgccattcattaacgaggctgagttttcaatggttgttgaagggtgataaatgaagtttaaatatatttttttagtgataattatcggcgttataataagcgtgatttacagctctaccgatcggagtaacgggaataacaggagcaacaggaccaaccggactaacaggaccaacgggagatacgggagatacgggaccaaccggactaacaggaccaaccggagataccggaccaacgggaccaacgggactaaccggagtaacaggaccaatcggagataccggaccaacgggagatacgggaccaacgggagatacgggaccaaccggactaacaggaccaaccggaataacgggaccaaccggagataccggaccaacgggaccaacgggactaaccggagtaacaggaccaatcggagataccggaccaacgggagatacgggaccaacgggagatacgggaccaacgggactaaccggagtaacgggaccaaccggagtaacaggaccaaccggagatacgggaccaatcggagatacgggaccaacgggagatacgggaccaacgggactaaccggagtaacaggaccaatcggagatacgggaccaacgggactaaccggagtaacgggaccaaccggagtaacaggaccaaccggagatacgggaccaatcgaaaagcgcgtccagctcacgaattagcattgtcaggaaaaatccacccaccagaatattgcagtaacgcatggattcgtccattttcgccagacgaaaatggagaacgacaatagtcgctaataccgtttcctgcataatttcggtcagtgataattccggaatatcatggccgacaaaccgcatatcaacccaaagacaaagtacaataagtgcgcaagcggccgctgcgccaacgaagaataaaaagctctttagtacaatcattaacaccaccattttgtttgtagcgagtatgttaggtgacgagaatgttatttctgttcacattgtgccatataagtgcggatttttaacatttcgagctaaatagggttggtcacgaagagacgaaagcgtaaatatcgtcaacatcgtctgtgctgttaaggcggggcaatgtcattgcggagggtgtcatcaggcaaggggatgttaggatattgggggaccagcgagaggtggaaaacacagctgcggaactatcttgtcgatgttttcttaagaacgtactctgatagagaaaggttttttccaggctatcgactgtctggcctgaacgtcagccaccctaacggaaggggcgtgcaataacgtagttaatatatattaactacgttaacttattaagcaccactaaacatcggcactctacagtatctctccttaaatatataattaccgttattgaaggagtatcagtaaccaaacgacaagccagatatttaccgtaacacatgctttttatccgccttaagtaaaactgcacaaatcaaactgcaaaacaacaaaccagcgacgaacgtgaggacaaattcgtatggcaatgctataacccttaatgccaaccaaaatataatgccccaggaaaacgtatgctaagaaatattagtgtcagaacgttcattgtctatttccttttatgtgtatttttggtaagtgatggagttatagcgctattttcacggaattcttcgctttttattgcagtcataattgtacaattcatcgcattatttttactctgggcgtacatgacaaaatatcttgtgacgccgatcaatactgtgaaaaaaagtattgaagaagttttaaacttcagacgttctttaccaaaagaaatatcaatacctttgataatcacagatccagctaacttctccccaggaaagtttttttgtaaagttagcaccggtataaaaaaagccccggttgtatccgtcctgagtgattcagcgatcttacagaggcctctgggtattcttcgctctgctttagctacagcttcgtattttatatagcgtacgttttcaaaatccagcaccccgccatatttgtcccattcattcctactgacagtgatcatcctgcacgtagcagtaaacgttccggagtacaatcctgggatagtactgatattacagtaataacacgccacatatgtcttcagcacaatccgaaacgacttatcgttaacttcgtgaccatggttgctaaaatgattagcaacgtgttcaagaattttatcgtcaattgtttccatcaaagctttatggtttttccgtatcagagaactttctcctttatgagggtgaaatacatcagacagcccgaaaaactcaaccgaaccattcacactaaattcattgaaatcgaagcacagaaaccaagtacatttttagatgtgtggtttggtgagtatccatataatcgagattactttagaattggttatcctttgaaaacagagcaattacccgttgaaagaaatcaaagacttatatgggacgaaatggctaccactgtaggatggagtaaagtcagttcaatggaagatggcaatccaattggtgaaatgaagtcagataaataccaattttattgttctgattttggtactagtgcggggaaagggtggcacggtgcagctgttaaaaagaatatacctgggggtccagtacaagattttattatgcaagcccatgttacatgtaagagtaaaaaaattaatgaaatgggccgagttgagatagcgatattggatgaaaatagcaaggttctttccaaaattgccatgtctgatgtgttttggcaagctgaacaaaactttgggacgatggtaattggatatgataataagccagggaaaacaggtttaatttatgagagtggtgattatccgaatacatggaatcagtatttaaaaaggttcgtggttggtatcgaatataaaaaaatagaatttttatacaaaaagcacccaaaagggtgccttttgtacctcttaaaatgacttaagatgcgtttacttgagttcattaggtagttagaggttgatagactatctttaatgaaaatgttgagcaattccattttattataaataaatatataaaaatgaaatatgtaattttgcatcattaattcttttctgatcctatatccaagaaaagtttacaattctcatatacattgcttatggtgcagaatcagatgcaaataaacgatttgttcctgcagaattatgtgaaacgagagattgcgagaagttcaaacgtagctatgataaatacgttgagtcattagctaaaatccctagtgatcgtggattaccagtaaaagtattatggattctatactatgtaacagcaaatgaagcttatgtgtttgtgaagtaaaaaacaagagccgtccttcatctgaagtgacccccgaaagttagacaggtcgtttcattaggcagcctctagggtataaccgccgaccccctgcttgtaaggcaggtgctctcccagctgagctaatcctccaaaagtggtgacccgtacgggattcgaacccgtgttaccgccgtgaaagggcggtgtcttaaccacttgaccaacgggccaaatactataaatcctatggcggagagcaagggattcgaacccttgatacgcttgtgacgtatacacgatttccaatcgtgctccttcggccaactcggacagctctccaatggctccgcaggtaggaatcgaacctacgaccgatcggttaacagccgatagctctaccgctgagctactgcggaataatattgcctggcaacgtcctactctcacagggacaaggtcccaactaccatcggcgctagagagcttaacttccgtgttcggtatgggaacgggtgtgacctctctgccatcattaccagacttttatcattataaacatttctttcgaaatgtcaagaagaaattttaatgcatattccttcaaaactagataacattgctacatattatatggttaagtcctcgggtatcttgacggagagaatagcagtaatggtcggtgcttcgatatcggcaatacgacgcggttcgcgcttgaacagtatatgcgtgtcggaccttcctggtatggtaatacagagaaacacactgctggtaatgctggggttattcgtcaagcaccggtatctatctttcgtcgaaaatcactgcgtgcgatttacttcgaatcacaggctcagagtcgagcaacgcatggcgcggtagaatcaattaacgcatgccaatttctcggattggtattgcactatttaatcaacggttatcaaaaagaaggagctttttcgcctcatgttttcccactgtgcgcgcgtgtaatgatcataaacgcgggtgagtataagcaaaaaactcgcgaccagattcgttcaagtggttatgttatcgatacgcttgaggctgcgatgtggtccgtatggaatacggataatttccgtgatgccattctgctggcagccaaccttgccgatgatgctgacagcgttgcggcgacggcgggacaaatagcggggatccatctggtctattgtctagttcaaaaaacgtaatacgcggaaactcttcagcgtttttggctttacgataatacacacgttttccacctaataaggaaacaagctcctgattattttcaagagcttgcacgatttcagggcgtaaatttatcatacatttagcctcatctcgttctttaagatgtctgtcatagcacgtaccgcatccgctttagaagcgttaaaacctggttctataaatggatgtgctggcattttagaagtaccccactctaaaaactttccatagaaatatggagaacggtccgctttgtctattccaatcttgatcgtcttcacaccattttccattcgtgccttcgtaactcgtatattatcaagcaaatgttggcctgtacgccaaggttcacttttagacggtttcttaggacttgaactcctcggttcacttctttctgcaatggcttttcgaatttgctcaccaccagctgcaagggctttatcttcaatcttttctccacgtaaacccatttgctctaattttgtatgcgaattgaaggataacaaagttattacacaagtgaaacgagtgattaaagatacatttaacaataaagtggaattatggggatcgtggggatgcgaaggaacaatacatggtgattggggctacaatcatgcgaataaatgtagatatgccacagttgaggaaatcaacgcagaaagtgtaagacgtgtatttgctcaaaaaggacgtaagccgaacgagtatcgttctggtgatattgtaactgatgatgtgtatgcatatcgtgtgttacatgtaatagaagatagagcaactgtagaactcatgaattcaaatcaaatgtatgaagttgcaacagctaatttagaaatccttttctttgatgaggatatggctggataaagcaattgcataaatagtttgctcaatctcaaataaaggataaggggatacatttaaaatgcgatatgcaagaggcactcaatatggtttatatgcatgtaagggtaacaataaagattacaaatggtttaaaaaagctaggaaaggtatgggaactaatttcatttatataccagcccttataatttataagactgattatatcagaggtgaaataaaaaggaaaaccttttggctacgccaaaccgaaattcatctcccacctatcgttgggctacgcccttcacacgcttgaggaaggagaattctttcgggaagttcgttaaaataaaggaaaatgctatttaacagtaaaaatgtagtaaaaactcttctataggcaagaagagtttttttagtctatagtgttctgtagggattagtatttttatcattaaaaacaataaataaatatatataaatataatgtatatgtgttattatgattacgttggaaaataaagtatattttgattcgtaaaaataattaggagaagaaggggaaatagcatgaaaatgaaaaaaatgattttaacaggtgtagtacttgcagcaacaactttaacatctttatcaaatgtacaggcagatacaacatttaaagatgttccagcaaatcactggtctacaaaagcaatttatgatttaacaaatcgtaaatgcgttgaatattctctatggcggtgctgctccctcaatgctggacattcaatctcgagctatcagtcgtttcaactcttctttctctgctttggcacaagcacttgagaatcaggaagaccccgaagaactgactattgaacctactgtaaaaggtcaaggtttacctttgaccgtaacctaccagggggagacagctgaagcggcacaaaagcagcttgcgcaatatatccagcagatcgatgaacagacagcaaaagaactgacgcttgacctcaatgacaatctcaagcagcagatcacaaccctgaacgactccctccagaaccaggagaaagtcgcacaggagcaaaaagatctgcgtattaaacagatcactgagtcatttaagaatgcggaagccgcgaagattactacaccccagattcagcaaacacaggatgtgactcaagaaactatgttcctgttggggacagcagcgctgaaatcaatgattgataacgaagcgtcacgtccgctggtcttctcaggcgcttactccgcctgcgcagactcaccttctggccaagagtcgatactaaattctctctcaggactggtaaagcggctccctccctcaaggggaggttcttctggccttgctaattcttcagcgcccagtttaccaatcccttttggataataattctcattatcactatcgctcaccgttacctcctgtagtaaaatccaccataaacagtatgtataatgaatcgattatgaagtaaacaagtttttattttgaatgaaaatagctcgaaaattgtaagttttttgtaagagtaaaatcgacgccaacctctaaaataaagggggttccggcgatttaccaggtaaaaatgaacattcataaacttgtacagcatacataaatttgtggcaggcattcactatgttttacattgtcacgcgcaccgcgaatgtagctcacgtcagttctgttcttattatcagggtacagggctggacacgttgtgtcctgacagcactcctagctggtgagaactagctgatgtaattttctacttatcagctgtaatcaatccctttcttttaaggtgaaagcagaacaccatttcttcatatttaagctgattggggtagatggtataaaggctccgatatgggcgagtaaagatggaatgggacaagtgtattttaaatgataaaaattctaagattttcactataaaaaactatgctgaaaagtatagtttttttgctagaaaaatatatttaaaaataaatatataaaaatactttacaagcctatttttatatggtaatattttccatatagaacggcggttataaaaaaacgctaattaattaatttatatgttaaagtatctggattttatgtttaatttaggtacaataaaagaatctatgaaaaaactaatatatttggaggaacaaacaatggcaaacaaatttttaaaaacagcaacagcattaacaattatgggaacatctttattaggagcaggagcatttacagcgaaagctgctgataacacagactcattaaaattcaatgatgttccagcaaatcactggtctagtgattatccgaatacatggaatcagtattttggtcgattgtggatagctagaacgggaaatgtatgggaagcatatatttcaaaattcttgccagggacagagaaggatgattcagagcgctttgcacggtggacggatgaaaaaaacgatcacatggaaaaagcagcacaaatccagattagtattatgcaatggcaagatgtaccaccagtagaagcaatgaccgtttcagatttgaaattttggaaagtcaatttaaatactcaaaataatccaccttacatttttgaaacaggagataaaattataattgataaagaaaaaagtcttgtaaccattaacggaaaaaaagccattaatttaaaagattttttcagtaattttccaactgtaatacgtggtgaaaatcgtattgatatcatgccaccagacgttaaagcaactgttcgttatagggagagatacagatgagaacaccaagcggcattttgcatgttgtggattttaaaacagatcaaatgagcaggggaaaaggtggagattgcctcaaaaccttacctattgctatataatactattcgtgaaaagatggattttcaaggggaaccagcagtttataaatcaggaaaataccgcggacaaccgatgcattatgacagagaagaagaatatgtaaaaggtttacgcaacatcttaaaagatttagcttcaaacgttttaatacgtcgtgttttgtttggaaaatctgattttgatttcgatacacatttggaacaaggtggtattttacttgtgaatactgcgaaaggggaattagcagacctttcaaacgtattaggaaaatttgtattgctgagtatgcagaatgcggtattccgtagggaaccaaacgtctcgccttaccatcacattattgtggatgagttcccggattatggtacgccaagttctcctataaacgtagcggcgtgaaatggaggggctgactcttacacagcctaactatttgttcgaattttatgggtgaaactcccagagcaggggaaaaggtggagattgcctcaaaaccttacctattgctatataataccattcgtgaaaaaacgggtttccaaggggaaccggccgtttataaatctggaaaatatcgtggaaaaccaatgcattatgaccgggaagaagaatatgtaaaaggtttgcgtaacatcttaaaagatttagcctcaaatgttttaatacgacgtgttttatttggaaaatcagattttgattttgatgttcacctagagcaaggtggtattttactagtaaatacagccaaaggagaacttgcagatctttctaatgtactaggaaaattcgtattactaagtatgcaaaatgctgtattccgaagagaaccaaatatttcaccataccatcatattattgtggatgaattccctgattatggtacgccaagttctcctataaacgtagcggcgtgaaatggagaggctgactcttacacagcctaactatttgttcgaattttatgggtgaaactcccacaggaacccaccagagcctgatcgaggcgagcaactttatcgcgacaattgaagagcgtcagggattgaaagtgtcctgcccggaagagatcgcgtatcgaaaagggtttattgatgcagagcaggtgaagaaactggctgagccattgaaaaaaaatgcctatggccaatacctgttgaagatgattaaaggttattaagacatgaacgtaattaaaactgatatccctgatgtgctgatttttgaaccaaaagtatttggtgacgatcgtggatttttctttgaaagtttcagccaaaaagtatttgaagaggcggtaggtcgaaaagttgagtttgtgcaggataatcattctaaatcttgtaaaggcgttttgcgtggtctgcattatcaactggaaccgtacgcacagggtaaattggtgcgttgtgtcgctggggaagtatttgatgtagcggttgatattcgaaaatcttcacctacttatgggagctgggtagggttttatctttatatgcttaactatgctcgggaacttttgcaaacagccctcgccaaagaaattgcaaacttaaacaactaacctaaccctcactttatatttataaggtgaggggttaattcttatgctctaaataaaaccctagcccagatgtattatgaataatactaaacttatatccgcatgtgaattctcatccgatgcattttatttttcatgattgtagcatctgccatgcaatcaatttttctgattctcttcgatatacttctcagccaactcaggaataagctctcccacagccgacgctcgatttaccgcccggttaacctcaattttaatagcattggagaaacgcggctccaaatcaggaaacttacggttaatcgtcaatggtagactgtccatgattgaaccgatttctgcagcaagttttgccagcacataagtggcgaattcagtgtcgataacttcaccagtttcccgggcgttcttaagctcttgagcgtcagcctgttcagacgcggcagggcagcgcttctccgacatagcaattttcatatccgatccactcatccctctgcatgagtattcgttccataagaatataaccaagcttcggttgctcaataaatagtcaaattacaagtcacgctgatggatttatgggttacattcgcgtaaattatgtgacgaagatcacattttttttaaattccagggggggctgcattgtatgtgtcaaaactgacgagtagagtttgcgtcgaattaggaaaaatcttagttatttgtaagaaaagataaaatgtgtaaccgacattttggccatgttaaccggtcacgcgctttacgacgtacaaacctaaattcaactatgcatttggccttttctttttataccgggtgatttcccggcgacatcacggggtgcggtctttccgcataaaaataatagttggttattcgggatgggaaaaatgcatacatccgagttgctaaaacatatttatgaatatagaaaaggatacaccagaacatcgcctcagcaatattgctcgcttgtatagagcattcccaagcatacagcaaaacactcctcgagaaagttatgatgcattttatatttcaggattagggaccccttttagggaaactatcgccgaaaaacttcataccatcatggacagcggtctgggcagcataacggatgatataacaggccagcccggtgaaatggccaaagaagcgggtatggattttataaaaggcgacaactggtacgaggttttaaaaaatcagggaaagaaacttcttaacccgacggaatggaaaaacctggcctttgatacggctaaaaatgctgttaaaaaagttagtatcgaatcaacgccctggctgcgtgataatcctacggtagccgatatgctggtaacaggcgtcgatacccgtatcacctccacaaagctaacgtttcaagaaggctacaaagaagctattaaaaaaagcccaaagcctgaagttttcatatttgtctgcacgattgtttgctggctttttgaatatctccgcagggcaatgtctggctaaaacaatttttcgaccatcattaatgaattcaatcttaatgctgaggtcgttatcgccagagcgactgttccagaagagattgtctgcatagtctcttttgttcctggttaataatgtattgaataggttttgtattcgattgacctggccagtaagcaacagctcgattgcgtcgaaaatacttgttttgccataaccgttagggccgtcaagagttagcaaggacgccccgccaagatccaacaaaatatgtttgaatgctttgaaactagagacttcaatcctggatatttgccatttcattacgaatcatttccttgataaaatcgtcagcatttttgtctgtgaattgctggatagtcgaatatatatcgttcatgttggcttcagctacagcttcagttgcttgcaacctcaccccattaccagtgaagctgttttaagctcgccaaaggcgaacaacgccagcagcgaagccacaatcaccaattcgcctaagcatagatattcccagaacttttcagaatattcctcaactgtgtcgaagctgttacttcctaattgttttctgaattctttaattatcatctcccacggtatgccacataaatctgcagagccaaaaatcattatacctataggatgatgtttgcttaatgcaaacagtttgtcagcgccggtgtaaattttattaacgccatccccacctgagattgtaactgcagaatctgcagcaagtgatacagctgatttattaaaaaccgcaatttctgctgtcataatctctcctaaggtttgattgttagatgtatcgtaatgtctctgtaaactctatttcccatgtaaagtcttaaatcaaaatacgtctgcaactcatattacaaaaagtcatttatattatattgagcacctgccttacaagcagggggtcggcggttcgatcccgtcatcctccaccatatatgtcggaggggtagcgaagtggctaaacgcggcggactgtaaatccgctccttcgggttcggcagttcgaatctgcccccctccaccattcttaattaatgggctatagccaagcggtaaggcaacggactttgactccgtcatgcgctggttcgaatccagctagcccagccattaagagccattagctcagttggtagagcatctgacttttaatcagagggtcgaaggttcgagtccttcatggctcaccattttaattaatatgcgggtgtggcggaattggcagacgcactagacttaggatctagcgcctttggcgtgggggttcgactcccttcacccgcacttttaataaaataactcatacatgtcttgcggaagtagttcagtggtagaatacaaccttgccaaggttggggtcgcgggtgacggagagggctttccccgatgacttaccttatgaaattgaacgtgaacctttaagtaacagttttactcctggcgaggcgaacacatatcagcttttcttcccggatacagaggttcgacccattgaacttcccggcgggcgcttctttattggtgctaccagtgaactaaatgaaattaactatcgcaacagcgattgcatgttcgacttcagggaccgtattgaagaactgaagaagcagtttgattttattattgccgattcagcaccatcatattcgaatgtcatgatcgcagctcatatgtcagctgattaccttctgatccctactctgctggagaaacaggcccgtaatgcagtaggtaaacagcttgcctatatgcagaaaattaagcggaaccataacccttctctccagtttatggggacgtatgtgacccagacgcaggtgaaaaattataaaaagccgctcaaagaagggtacgtattgtaaatgctacagttagacggaacccttctggtagatattttgtgtcactattagttgaaacagaagtacaagaacttccgaaaacacattcttacattggaatagatgtaggactaaaagatttcgctattttgtcagatggaacacactatgaaaatccgaagtttttccgatcattagaagataagttggcgaaagcacagcgtgtgctttctagaagaatgaaaggatcttctcgctggaataaacaacgagtaaaggtagctagaattcatgaatacatatcaaatgctagaaaagattacttggacaaaatttcaactgaaatcatcaaaaaccacgatgttatcggtatagaggatttgcaagtatcgaatatgttaaagaatcataagttagcaaaagcaattagtgaggtatcttggtcgcaatttcgatccatgttagaatacaaagcaaaatggtatggcaaacaagtccagatgttaggcgcggccagctggatatttttaccctgtctgcaaattgaccgctcaggggcattaccttactttctgctgctgttgctattcctaatcagagacggtcagtcgttatgtatcagagccactttaattttaaaaatccgccattcaggacaatcacccgtttatccggtgattttctggtgccttatcatcaggacgtgttcaacctgctgaaagagaaaacccagctggcgggtattatcgggcttttttgcgacgacgctccgcttctgagccacttcatcgacgcgctgaaagccagcagcaataccgttattgccatcaacgcgtttcccaaactgagtgccagtagcctgctgtacaaactcaacccgggaacgaaagcgattaaagatcgcatgcaggcggtggatgccgtcctgcgccagtggcaggaggggaaagcaaaatccagagtgctgaccatcgtaaagctcgctcaccactccaatttcggaatcgctcttctgaaaccggaatttatttaggtcccatgtatgcgttcacatatcgcgtgcaatagtattgaggttattgacggtggatatcactacccttgcccgtaaatggggctcaagactacttaaggccgtctggtttgtgttaattagcttcctggcaggacgtatgctgggtccttcaacagcttatattaaccacgacgttgcaactgctatttgcggcttcatctatggtgatattaatgcggagacaatgtacgaaacatatacaaatattgatattttgattctgttaacatctgttaggatcgtctgtaaaataacattgaagatattcaacaaaaccaggaatcattaatcttctaatcccgccctgtctgtggctcaaagacgacggctcaacgtagtggtacttcactgagggcaattatttgcccttattgcctcaggatatcatcttgtggcgatttcggtggctccgcttacaagcttttactctttaattacgcctcgggcgcgcagtaatgcggttttaaaatcctcttcataatctttctgaatgccaggaataacagcatctttagccgagtcacgcattttcaggtggtagatcaggatgtcgtcagaaaggtccgccagttcgccatcaaaacctgactctttcgccagtttctgtaaaaattgcatcagattcagctctggctctttttgccaggccggctggagaagctcaatgacttcattaagacgtttacatttcatagtagtgctcctttcatttagagagacacgttagcagggtcaatcccacagtaaaagaggcgatattcgtgaatcaatgccaggaaatcatcggggttgttctggccgggggcagggcaacgcgaatgggtggaaaggataagggacttcagctcctggaatatccggcatcttgtactaaaaatcgatgttttgctttgacaatcccctgcgcttttgcgaaaacattcaaggaagaaaaaaagacgcacgaactgcatgccgcatagacatgcacggaaatgccatttttaccgggtcagtgaaatctacgcatggtgtggacagacgccatacgtgatgtctgtgactgctttcgggcaacggtcttcttaccgcagaacccgaatccacatcgcgtctaatacataaccaggcgatgtgatgaataacgggtacaggctctgaacagtgatgtgcacagggtccaggcaggagtagggaaggaatacagagagacaataataatggtagatagcaagaagcgccctggcaaagatctcgaccgtatcgatcgtaacattcttaatgaattgcaaaaggatgggcgtatttccaacgtcgagctttcaaaacgtgtgggactttccccgcttcttctcggataattttggtgcattcaacatagtcagagtaagcatcgcaatatgttgctaatgcattcacatctatgttcgtgattacgtctagctccaataattcaccagcaattctcctaaactctttctttgcaactgaatctaaccacgttggtggctttaccttgtccttttttgcttgcaactgtttttcagcttttaatcgttgttcaatttcatcttttgtcaatcgatttgtattaccttctaacaaatgcaaatgaatcggcttcgctttccttcctatgtgaaccacctcccttggctgaacccccttttatggaataaaacgaactttttacacggaaagctaggcggcggtctccaggaattcgccttttgctttttcatggtggggggatgtttataaattttttctttcgaattattttttgtttttcttctcatcttcttttgttttcttgttttaccatcgttccaaaattttgttcagcttgccaatagaggtcattcatggcaatctttgaaagaactttgctattttcatcgagtatcgctatctcaactcgtcccatttcattaatgtttttactcttacatgtaacatgggcttgcataataaaatcttctactggtccaccagggatgctctttttaacagctgccccatgccatccattacctgagccatagtccgaacaatagaattggtaactatctgttttcatttcaccaaccggattaccatcttccatagaactaaccttactccaccctacagttgtggacatatcatcccatataagacgttgatttctttctacaggcaattgctccatttttaatggcagtccaatacgaaaataatctggttcctttgcatatttatcttcaaaccatacatctaaaaaagtatgtggctttttaatatcaatttacactgaggagatggcaatgaaagaaggtttctactggatacagcataacggcgtagttcaggtagcttactacaccgacggcgtcaccgaggatcttgaaacgggccagacaataaacggtgtctggcatctgacgcgaggtgatgatatttgccacaacggagaggctgaagtgattgaaggcccactgtctgcgccattgaaatgaatatattgatctgattacttggcagattctttgtactgcacatatgctttttaagcatcctgcggaatgtatgggttctgaaagcattttggtggtgaatccccctatgcggaggggcgttccagcaattaccagaaaaggaaacctctcagacgcgagaatgtttgctggagtaattctcaccgggaggcacccggcaccactctctcagctattgccaacttagcaactatgcctgctgtccgagcaggcttttttttataaatgacgcagggttagcaaaaatatcgtcatcagtgcctttagtagtctctttcttgattttaatcagcaaggactggacatttattcggcacatttcagcttcttttttattgattatttgtctctcgggcagcaaggaaataggggaaatcatgcttacttttctcgaactcctcattggagtcgtggtcattgtcggtgtagcacgctacatcattaaaggttactcagccaccggcgtgctatttgtcggcggcctgacgctgctgatcattagcgcgctaatgggtcatcaggttttacccgccagcgaagccagtaccggatataccgctaccgatattgtggaatatataaaaattctgctgatgagccgcggcggcgatctgggcatgatgatcatgatgctctgcggatttgctgcctatatgacccatatcggcgcgaatgatatggtgagagttggcttttgcattaaagaaaaccgtaaaaagtatacgcagtgatgcaacgcgaaatccaaaatgtctgccaccaaggtgccgtcttccaggtaataaacgccttctctggcgtagagaagatgtcaaggactggatagataaatccgttgagtcaaagaaagagaatgatgatatatcgaaagagatacataagtctcaaaggaagcgtggcagaccaccaaagctcaagccgcaagaataaaaatattcctttgggtattcaaataattttccttccaataaacacatatgctgcacacttttacacgactaatcctgcacaaatgctttaggaaaacacactgagtacacaggaatacacaatacgtacacagattcacaacggcaaatgtagggcaggacatgtaaagtaggcccaccgtaaacggtgcttctactttaccttcccttattcctattcgtgcagcaaatgaagttgaaaagaagaaaatcagcctactaattgaacagtcagcagcagacgcctataatatcgtgacgggtaaaaaggtggaagagcatgaaaaaatttaaatggattaaactcaacaatcgtttcactactagtgaaacagttgaaaaactcatgcgtgatccttttactgaagagaaagggaaagggtttatatttgataaatcacgaacatctcattttcacgctcgcttcatcgaaaagataattagcgaagatagaataagtaatctatacggcaacagtaccgctgttgaacgcattgaatatagagtaacatctttcagttttgacgaacaatacaccccagttttacttattgataatccaccgagaacacttaaaccatttgctcaggcactggtaaaaaaccttggtcttggtaccagcttagaagagattgaaaattctaatttaaatcctgattctgtaacaatatccaccatgtatgtatctataagtggctcataaataaaatcatgatctattgtgatttgttcagtcatttagctcaccttctatcggtgaaagtgtaataatcatttgttgctctaaaacgttccctatcacagcattcatccataaattaggattcatttttctcattaaaaattcgatgactacaattaactcttcggtagataaggaaacaaattctcctaaaggttcttgattgaacctgccaccacatttttcaattgttagacctacttcgttgtcaatcacgtacctttttgcagttactaaatcaaattgacggactttctcacggccgaatcctattattaattcctttagtacgtcatgaatgacacgaaaatctaacacttttactttctgttcaagctgctctctacaggtcactcaacatttaaatttagagttaaaagattcagccttgcaaatgaattggcttataattccaacccgtctttttataactattgcacaaagcaaaaaagactagatgcaataacattactttgccgtggtttctttataggaaaagatgaaaccttatccatcacaaaaaaaacatgcaatgataattttggcatcagtgagaacagcatcacctcaataatcaacacattaagcgtaaaaaaaagcatcactatttcaagaaaatatcatgataggagagaattgttaattgaacccactaataaagggataacagaaatgtttttgttctttataagagtgtcgtttccaagagtaaagagaagtgattatgaggatctagttgcaattaaaagtgggaatatatataataaaggactcattaatgtaattagtaattactcagagtaccgaacatcttcgtgccaagtgcatttctgtctgttgcattttcaacaccggctaaagctttggtggcttcaagcatcgctttttgtccaccttcgccaccttgagcgatagcttgaccccatttttcaaactgatccgccgaaatttttgttttatctaaaaccgcttgcatagatttatctacacctgcaccaaactcagccattttgatacgtccttctttaacaccgtctaataggttatcgatattccaactcttagtatctactcctgctgacataattccttggacttctttagccgaaaatccagcttgaatcatttgatccccatattcagcgataatatctaattgttctggtggaaatcctgtttttaataatgtattaactagccccaatgcttcctcgttcgtaatacctaacgttgcaccaatctcattggtaggagaagaagtagaataccgaattagttttaaaaacacggtagaaaacggaaagctagcagaggtaaaaatagaagacaatttaccaaatggattagagtatgtgaaagatagtttacgagcggaaggtactaagccggatccagtagaactgaaagtgaaagatggaaaagtaatcgccaaatatccagagattacggatacagaagaaagaagtatcgtctttaaagcgaaagtaaaagaagaatttaaagttggtgaaggccttgtcaataaagtagttgttgatgatacaaaagatccaacaacttcagaagtaacaattacgccagaatataaagacggtaagcttaaagcagagaaatttgtaaacaataaaaaaccgaaattaggagaagaagtagaataccgaattagttttaaaaacacggtagaaaacggaaggatatgacgttcggtatgtatgcagggaaggagtttgatcattctgatgagttgttttttgaaaggttgtcagatgcctggtttattgtggatcaaatccgccgagggttaaaggttaggctgccgcatgaggtcgataccaactataataaaaagaaacaaaacctcatgaagaaattccctgatgaattttagtatttcatatgaataatattttttattatgggtgaaaggtgattgacttacatgctgatttaaatgccttgttaacatatgttgatagatatcgtaaatacttacccattagcagaccttcagtccagcgaaggatgcagtatacgtatgataataagccattagagtcatcctcaaatagtgatgtacaaaaacaatgggatttaccaccaccatgtaatatctcactagcgcaatcactatatggggttgggcaaagcttcagttaaggagtgttgtttggatgcacttatagtccctttagacgtaaagcgcagcggaacataattgtattaagaatatttgttctccatgctattgtgtgactctaattcacatatagtcatacaaagtaatattagtttcactttaatgttgtatgaaggtattgcatattacacattgaattttatttgtgtgggatatatgtgaaggggatgaaagcaatatgaaggtgtttgaagtgttagaaagcctcaagaaaggcgagaaattgaaagagatagctaatgttttaggaattaacaacagcacgttacaaagaaagctgaaggctttggggtatgcctttgatagtagcactaaagaatggttctacaatgacaaagataacccagagccattagaagaaaatattgtgattctcccgatctgcaccctcaacacattcctggagtcccgcacgctgattgtctggtttgtctgtttcatggacccctcaccagctgtcgaaccgtagttctcaaacgtaccgcccttatccagcctccacccgactgagccagcgacatagttattggactggatgtagttgccgatcttggcgttgctgatggtgccatcacctatcagcgcgtttctgatgaacacctgcccgttctgaataacgaacggaagcgtaacggtcgctccggcctggtgagtaacggcgaaacggtcagccaggaagataacctgcgactgcatgccggacggcgtattctccacgccgatccccatccctgccgcgtaaagctgaccattgctggataacccgaccttgatgctgtacatcgccttcaggaacctaaacgtcctgttgagccaaagttcatctatcaggatgtgacatttaaagctcttatccagggcttaagcctgcatgctgaagctggcatcatcatggatgaagcgatctcttttttcagaagtgggttgaaaaatcacctcggactgttgaataaaggctgggatggagggaaatattcatttgacagaacggatggcgagaactatgaactcccattatgtctgatgctttcactaatgattcagcctggcgtatttactaattatttagaaaaacatggcgagatggttaaaagtagcggtttacttgcccgcttccttgttatgaaggtaaaaagctcaatagggcaacgtaatagtcgtattgatgaagagggggtgaatgcagtattagctccgttttatagcaaaatacaggggagcataacacccagaacaattgaagaaaaataaacgatcgattttacagacgaaaaccctttcgatagacctgcgttaatgtaagctctgataagataaattgacatcacatcaagcagtaaagagtaccaaaagccaaaatgaataaagtcatgtaaagcaacttcaatggtcaatggcagatgttgaggaatgatgtgctcaggatttctaaaagtcagcacccagagataccaaactacaaataagatactggaatataaaaccaataaaaacgggatggtaattaattgcctttttgagaatgcatgattaccgaatgccaggaaaaaagcgcttacccattgctcggaaaacttggttattctgttttttttaggtatgaggagttctattttttgtattgcttttgttttcatttttctagcgcttcaaaagtaagctttaaaatactcatgggatctgtaggtacatgttgttggctctgaatatagtttttcatacggttaaactcattgatgtattttacctttagtaacattgctttttgcgttgtataactcatagttacgagcataaacgcatcgaagtttaaaatgtatttttcttgtattcgattgcggttatctcgatattcaatgggctcaaatttgagcgtattaaaattaatacctagttcatccacttcagcattatgttgtagacttgctaatttcgaaattgtttctaagatatctcgttttatatttttgtgctcctttccaaacatctcagcaattgtcaaactatctgttactacctcaccattactttcaaataccagttcgtttgctactgttaatccattggatctaataaataatagtattacaaaattatcgactgaagttgataccaataacacccagtctcaaaaagatacattaagacgattaaaaagtgtaacaactcaactcgaagaacaagtttataaattttaatattaagaaattaggtttaataaaaatattataacgcaactgaaaataaggaggagaatcaaatgatgaaatttccatttaaggttataactttagccactttagcaacggttataactgctacgaatggtagtactattcatgcacttgcacaagaacagacagctcaagaacataaaatagaaaattatgcgttaggacctgaagggttaaagaaagcgttggctgcaactggctctcatattcttgtaatggatttgtacgcaaaaactatgattaagcaaccgactcttcaataaacttgattttcatttgaacagcttcttttgtgttataactcattgcaactagcgtgaaagcttcttctgttaagttatacttaaggtattttcgcccacgctcattttcataatttgactcgtgaaaatttacgagtgaaaattcaggtcctgcatattcaatttgttttctaatatctttcaacacattgtcatgtgtctttacaaacatttcagcaatcattagactatctgttactacttttccgttgttttcaaatactaatgcttgttcgtttgctactgttaaatgattcatgttactttcctcctctacaaattcggaataactttagttttattcgtattacgatgcgccaaatgcaattcattacttacttttttaaaaatcaaccaattatcaggattcaatcaacgcctgcctgtgtcagcgtgagtttagtcagacatgctgaggcacgtggcgttttgttatcaatgaatctcatctcgaccgtggattttgaattgccattcaaattcacttttacacggtaagtacctggcagaactgggttgccataagcataacgatcgacattgatacctccaccattatcgataaggaactggtcattaaattcaatggccgattctgtttcggatgaggtgtctacagcttttttttcagtctcgctggcatgcagaggaaatgctgcacagattgcgagacataaaattgatcgttgaaatagcatgcttcatccagacaagtcgtcgtatgaatgctatgaatcattcatacgtattatatttataatgtggcggtgatgcggttattagtttactttgtccatatatcgtaacttacattgtctcggaatttaacgcagcatacttgtaaacgcggtttccctgttttacgtaccccatttatcattgctgttctaaaatgagcagataatgtgtattcatttccaggatgtatcccattattcacgattgcttctggatagttatacatatctacccttgcagcattcaccatttgctcgtaatcgaatatatgcgtattcttttctattacgacatttccccatgacttccaagtaagaccgtatccaccttcaaacccataataatcgttatgtccgatgtttttctttgtaacactagaaaagtcgggatctgctatcaggtttcgtcttgataccgcggttgtttttgttccccattcgtcttggaataggaaatctagcattttaacagttaagaagactacattgataatcttaaaaatttctggaatgtttcagaaacaaagttaattcaatttattttagagaatgatcaaaattattatgcatgggtaccaaaagaagcaaacatcccaaatatgtatgaagtgaagattgagagtgtcgatgtagaggaagttctataataagcaaattaaaacattgtgtatcatgagtaatgttgaaaaaactaatttatacggaatttaatgaattaagaggttaaaaatagtggtagtttggagaatccaactgccactatttttgtgtttacgaatggttctgtaaagtaagtagtgtgtttaatgaattcaatcattcatccgtccagcaacaattacagcaccgccctccaattagcggctagcatcacagccggactcgctgaagtgcgattcttcgtcagccgcattggtgccgacattgccgatatgaggataagtaagagtaacgatttggcgagaataggaaggatcagtgaggatttcttgataaccggtcattgaagtattgaaaacgacttccccaaccgccgaacccgttgcccctatggcccgaccgataaactgggttccgtcttccagaaccaatagcgctgacttaatcaaaacaccctccagagaatattcactcactttatttgcatattaattcataaccatatcatggatcaatgcaaatgtgttgccagcggatttttggcaaacggcggcattctggggatttgccatgtaaaagtcaacttaaaacgggagttttgtttattcttttgcaagcctggcatctggaattggatttattccccatgattatggttctgccggttgcgatgtttgttgccagcggctttgagcacagtattgcgaatatgttcatgatcccgatggggattgttatccgcaactttgcaagcccggagttctggactgctgtaggttcaaccccggaaagtttttcacacctgacgattatgaacttcattactgataacctgatccccgtcactatcgggaacattatcggtgggggtctgttagttgggttgacatactgggtcatttacctgcgtggcggcgatcatcattaatggttgtctcaggcagtaaataaaaaatccacttaagaaggtaggtgttacatgtccgcgcttaatgaaaagttagccacagcctgggaaggttttacgaaaggtgactggcagaatgaagtcaacgtcccagtatgttgacggtaataccacgactgacgccgttggtttcggaatgaaactgggctatgactggaaaccaaacctgtctggctacgtcacgccttacgcggcgatttctggcctgttccagtccggtgatgactaccagttaagcaacgacatgcgtatcgatggtcagtcttacgacagtatgcgttatgaactcggcgtggatgcaggttataccttcaactacggtggcgagcaggcattaacgccttacttcaaactggcttacgtgtatgacgatgctgacaacaatgctgatatcaacaacgacagcattgataacggcgtagaaggctctgcggttcgcgtgggactgggtactcagctcagcttcacgaaaaacttcagtgattacactgatgcgacatatacaaagatctctccacgtggcaaacgttccgccggctctggccgatgattgctcctttcaaagcaggcttgatcgtggcgggcgtagcgttaatcctcaacgcagccagcgatacgtttatgttatcgcttctcaaaccgttactggatgacggtttcggtaaaacggatcgttcagtgctgctatggatgccgctggtggttattgggctgatgatcttacgcggaatctccagctatgtatccagctactgcatctcctgggtatccggtaaagtggtgatgaccatgcgccgtcggttattcagccatatgatggggatgccggtctcattctttgacaagcagtcaaccggtaccctgctgtcgcgtattacctacgattcagagcaggttgcgtcgtcctcttccagttcaaaattttaaacgaagcaggcatcagcatgctttctcaagctaaccaaactccacaaatggtttctaaattattacaataatccatttgaacatatactctctgtagtatataaagagttttcttttaaataattaaaaattaatgggggttcttaacatgagaattaatacaaatattaacagcatgcgtacacaagagtacatgcgacaaaaccaagacaaaatgaatacatctatgaaccgtttatctagcggtaaatcaattaacagtgcagctgacgatgcggctggcttagctattgctactcgtatgcgtgcgaaagaaggcggattaaacgttggagcacgtaacacacaagacgctatgtctgctttacgtactggtgacgctgcattaggttaccggcgatctcctgcgtgacaggcaggcatgttaaccactacaccacgggaccatttggttgcggggacaggatttgaacctgcgaccttcgggttatgagcccgacgagctaccgtgctgctccaccccgcgatgataaaatattcactttagaaaaaatggaggaggtagagggattcgaacccccgcgcgactctcgccgcctgtcggttttcaagaccgatcccttcagccgaacttgggtatacctccatgaaggaaaaaataaatattttattattatatgtctaaaccattagagaaaaaatggaggaggtagagggattcgaacccccgcgcgattctcaccgcctgtcggttttcaagaccgatcccttcagccgaacttgggtatacctccgagagatttgaaaatgaattaaagcaagtaaaccgtcaagctgaacaaaaagggatggacaagttaaataactctttgaaatccttacaggctgaatttcagtctattacaacaggtatgggcggtttttctaatgcaacagagcaaacacgggcaaaaattgatgttctcactcgcatggtggataagcagaaagaaaagattagggaacttcaacaagcctataatcgcgcaaaaactgaagaaggcgaagcgagtcaatcggcacaacattatgctgaacaaattcatcgtgctacagctgaacttaatagatttgaaactgggttacagcagtcaaatcgtgaattagagcagcaaggtaatcgtttattgaattttggtaatcgtatggagacattaggtaatctttttcttcatacagaaacggaggaacgtcgtattgatgttcctcttgtaattaaggcagcaaaagatatggctgatttacaaaaggtaaaagaagatttagcggattggctatatacagagcaaccagctgaacttgtttttgatgatgaattagataggacgtatctagcattaattgatggttctgtagacctggatgaaatagttaatagaggtaaaggggttattacttttgtttgtccaatgccatataaattaggaaaacaaaatactcattcgttctctcaaaatggttctactgaagtcactgcttcttttgtcaatcaagggaatatagaagcacctgcaattattgaaatcgaagcacagaaaccaagtacatttttagatgtgtggtttggttttccttcaggagagcacccacctccgccatcgacccagagcgtcccccctttaaaatcgggagtattatcgggtttatcctgcttttccggactccagccggggctggccggcgtccctgttgtcagtccgtcaaggtttgtcaccatgccatacatcatgacgacgaattctttaaggggtctgccagacagtgactggctccacccacccgtaataaatttattcataatctgtatctccctatttgtatttttccacaagagcataaaggatcgcggcagtttcagtatccagcttaccgctgtacttacagggacgaaaatgcagctggaatgcacggattaactgagcataaccggcgtcacttcccgaacctgaagtgtcgtagccataccgtttgtccagccaggctttcattgcgccgttctgcatcgtgatcccttaagcatttttatgcttactttcgccgtagaaactaccacgcacaccacgtgtacgtgccggggttcacctgcgagctcttttcatttggcccgcgaaggaacctttagaaactgtctaaacttcagggcagtttttaaaggtttctgcaatctgtcccctctccctttgggagagggttagggtgagggtgaaactaccgcttattacccaccgctcttctgcgcttgtccaaatccttaatcaacctgttcaccccgtcatcggcgaacatcgcttcaagcgttgtggacagtttgcgtcgccagtttttgtattgatagctggtgccggggatgtttaccggctccgccatatcaatattgctatgccgatatccgtcaggagcgcaggcaagtaagtcgggcatcagaaaattcacaccaccacggcggcagtggttacgccagagcacgctttcaaagattctttcaagtgaaaaggatatatttaagttggatcatgaataaagaaaattataccgcgctggattatatcaatgatgctattgatgcaattaatagtcgattagagcaatatcctacatttctttatatgttatggagaagaatcagtaagattatattaaatctattcttattggtgttgaaaaatataaaagtaaattacacacattgaatctcggagtgcgtgcgtccaaagagtttgatactactgatgacgaaatttctcagcattgtccaatgctaggtatatagcttcgataacttacattctttaaacttaagaaatgcgacactaccatctatcacgagattaacagcagaggaacaatatatgtagaggtgactattattcattggctgtataaggtttaggttatctagcgatacaaaatctaataacttgtttgaaagatttgtaccttttaaaattccaccacataaatttctcaaaggaactttacccataaaataatggtgccccttcataaatgcattaatagaaaatttacttctcgccacattgcactcgtcatcaccgacttcacttcttaaccagaggaagtaaggggttaacacaataaaatcttctatccatgcactttttttcttttcctcgaaatccataaccccgtcatcccataaatataccttaccgtttgaaaccctgcgcagctactatctggatcgcggttacgcccgtttcaacatcgattcaactcaggtgagtctgactccggacaagaaaggtatctacattaccgttaacatcactgaaggcgataagtacacgctttcaggtgttgaagtcagcggcaacctggcaggacattcagctgaaattgaatctctgaccaaaattcagccgggcgatctgtacagcggatctaaagtcaccaaaatggaagacagcattaagaagctgctcggccgttatggttatgcgtatccgcgtgtgcaaacgcagccggaaattaacgacacggataaaaccgttaagctgcacgttaacgttgatgcgggcaaccgtttctatgtgcgtaagatccgcttcgaagatattcgccgctccattcagccatgagatacctttaatcctctcagtcattaatctaaaggtgcaaaacccgtaaccatcagttttgaaccgtaatcttgcgtagtttaccgtagagacgataccgaggcacggatattgccgctgtagcgtgtcctaaagcatataattttaacggctatttgcgcattgctcaatctatacgcaaagaagtttagatgtccagatgtattgacgtccatactttcaatgtttactctggtgcctgacttttcacctcattcgccaggaagcctcaccatgacgcgtaaacaggccaccatcgcagtgcgtagcggattgaatgatgacgagcagtacggctgcgttgtcccgccaattcatctctccagtacctgtataggaagtttgctgcttagagatcggcgtcagctgtgctttttgtgcagcggtcagactgtccagaatgtcgcctaactgcaaacctgatccgactcccaacgtagaaatacttgccatatttattccttaatgtaacgacacgtagaacgaatagtggggttatcggcctcaactcaggaaagtttacggttagattcttttttttaatggcgagaatagcgctaatagagaagagtatttctgtggctaaaaaaatgatgcgatcctgaaaaaaaatctaaaggttgttttggaccagacgataacacctttgacggcgatgaagccgaagggtggaaacccaaatctaatccacagatttgatgaacaacaggaaacgaaatcatggcaaaactctggtttgtcagaaaaagatatagggtcaaagttgggatatacagcttcatggatcagtagtgtgttggctttactttctcagggagagaaaagtttacttattgctgctgagtctgggcatgtcccattgtaccttgctgtagacatatcaaaagcggcagataaagatgaacaagctcttttgaccaaagcattagaagaagggcatataaaaggaagtcagattaataaaattaaaaaaatacttgaaagccgaaggcatggaaataaaggtagcatgagttcggcttatgttcctggcaagcgagccaagaaattgacaccacaagagttagctgacttatatgaaaaacatgttttcgagcatcgtgctgttgtaatgaaatcttctaactcctattttacaaggaattgctgatttcttctctatgatttggaacggtatttccacagtgattcaaactgtatggaattttattacacaatacttacaagcgatttggacggctattttatactttgctacgccaatatttgaaagtatcaagaatttcatttctgaatgttggaataccattagttctactacaagtcttgtatgggaaacaattaagaatttcttagtttcctgttggaatgggcttgtagcgtttgttatgccgatttttgaacaaatcaagtcctggatcattgctgtgtgggatacaatcagttcagcaacaacgtctgtatggaatgctgttaagaatttcttacaatcgtgctggaacgggttagtacctgttgatttttatctgattcaaacacactaacccgccaataaccatctcccaagctctagctggtaaaagataaaaagcttcagatgctttatttgattcaacgaaataaactgatagtgttaggcttactataaaaacaaattgtagaacactatttattgccttcctattaattttgtacacaatgaacattaacagtggtaataacatataaaattgccactctactgataatgaccatgtatgcaggagccacttttgactagccgaagcatcaaaatagtttatctctttgaagtatattatattcgatataaacaataagcttgaataaatgtgtcgaccaagcgtctcgaaatctgttggcgttaagaagaaccaacatgagcagatggtccgctctgaaatttgcatgctcaagggtgatttcatgtgaccagctgtcgccgaaatcgtaaagatacgagaatgatttcccctttgtgcggatcaaatcacataaccggaaaatcgcctcattctttccctgctccggttcttcagggtcttcggtaaatcgtcttttgccaaataaaaactcgtgcaaatgtgagtcctgccatcccatgacaacctgaatgacatcgtgcagacgatccagtgaaatatccgcgggcaccacaaagcgacgccagatctccggcctggattcattcagaacgattttaagcaaatagtactgttcttccattgtttctgcccttgcgatcttaccctgtcatctactgacaattaacagtgtctgcatattgggttgatattatggccccgttattcactcctggccgtctccggattgctggaggcgctgcgttatgcagcgaaagctcaggataaattagcatttaaaatcagcctgataagtgaatttcctgatatcccgattatcagcaatgcggggattatcatgagaccggattccacccatgcgccgccggacagttttaactaccttgctgttatcggcggtgaattgcagtatctggacttagggtatcagggggataaagcgtatctggcacatgcccaccatgccggggttccgctcattggcattggcaccggcagttttgtcctcgcacaggaaggattgctgaatgaacgacgagcgtccatccatccttttttaatataattatactcactctcatttgttcttatattcatcgcttactatcaaagcccgttcaagcaccctcgcaaacaatatttcaacaaccactatcatcttttttaagtgataattaatttaagtatcagttcagtattggcttaaagaaaagccttgcatgaaatatcattaaattagtgcttgtactgacctctctcatcatatgcagtggaataatcatgcttaaaaattcagatagaaattttaatgaagactggtttctggcttcagttcttaatgcgcacatcgatgaaatgatatacagatactcatgccttttggcattacgtatggattttttctaccaaaaggaaagtgtcaggtattcacacttaaatcagccagtgaaatcccggcgtcaatatgctgctgaatgacacagtcgttgccaaactgtgtgtcgttaagcgaaaggccgtaatgcttttccagcagatatgtaagaagttgctgccagatttcaacgggtgtcgggcgtgacggtgccttccgaaccggaatggcggataaggtttgcataataaaatgctcctgaataaagtcgaattgaaaaggggatggattagaaagtggagttagcgggggatgctgttaccagacgtcggataaatcgcgatataaaggtaaccacaactgcccagtgtatctgcatcgcaggtcagcccttttgcatacaacgtgacgcaatgctgattgcggggattgagttcaccggaaactagcatctgcctctgaacttcaagaaattcgccgctaaagtgtccatcgacacctcctctctgcaatatgagaacgatgacctgatgcgtcctgacttcaacaacgatgactacgctatcgcttgctgcgtaagtccaatggttgttggtaagcaaatgcagttcttcggtgcgcgtgcaaacctggcgaaaaccatgctgtacgcaatcaacggcggcgttgatgaaaaactgaaaatgcaggttggtcctaagtctgaaccgatcaaaggcgacgtgctgaactatgacgaagtcatggatcgcatggatcacttcatggactggctggctaaacagtacgtgaccgcgctgaatgttatccactacatgcacgacaagtacagctacaaaatcattttcatcaatatcggtgcgctgattctcgttctgagatttcacgattctggccaccggcgaagctgctttcagcgtgccatcggaggatttagtggtattttcagaagtgtaaacaactgagcctggcttcacagacagcattgttgagaatgcatcggtgccattatttcttcctgcgatttggtaagagacggcaccaccaatgcctgcaacacctgccctgaagcgaggagtaccgttaaccatcactgtatgagcccatacactaccaacagttgaaagtccttcaacggtgaaagcgtaagggttaccggcaataccggcgatattcagggcatttgttaacgtaccaccgctaagactaagagcacttttgagttacacagtacgaaatttatgagtaactgtatagatttaaaaagaaaaagcaatgcttagattttaaacctagtcattgctttatccattgcatcttggtttacgcctatataacgtaacgtgaccttctctgacgaatgattgaatatctccatgagtaatgctatgttttttgtttgcatgtacatatgatacccatacgtctttctcagtgtatgtgttcctatttcatctaatccaaactctgccgctgctccacttaatatcttatatgccatgctacgcccgataggacgattcttcccttgtctactttgtaataaatactcattatcttctctttcttcaataaaccatttaagttctcttttcagatatgataataagcctggaaaaacaggtttaatttatgagagtggtgattatcccaatacgtggaatcagtattatggtaggttgtggatcgctagaacgggtaatgattgggaggcgtatatttcaaagtttcttcctggaacagaaaaagatgatgcagagcgttttgcaagatggactgataaagacaataaacatatggaaaaagcagctcaaatacaaattagtatcatgcagtggcaagatgttccgccagtagaagcgatgacagtttctgatttgaaattttggaaagtgaatttaaataatcaaaatacaccaccttatatagtcgatgttggtgacaaagttgtgattgatacagaaagcagtcatgaatgaaataataaacccgtccagcatgagtaatacggggtcagcgtattttaataaaggctgggcaaagaaagccattccgaagctaagtattacatatgaataaaaaaaagctgaaaaataagccttgcgcttctctaaagcattaatctcctgatttgtcgggattttattgatttccgcatctaagtatctaaaaaaattacgtagcatttattacattccttactaggaattacttgtcaatgatctttgtattttacatttgagttacgcaatttctctcgacatgcttcttttacccatgaactgaagtttcctgctccggcggcagcgttgatctgttcaagtaaatcgtcttcgaaacgaatgttttttctaatggagcatacttagtctgtgtaaagcaccagtttacaaatgaagagcaccatgagctttcaccatctttgcccttagcgttagttgtgtcatgatatatcttaattttatcatttaatacagaatcggtctcaattaaatctttatatttattatattctgataatgcaattggcatccagtctgggttattatttttctgagccacacatgaacactgattcttatatctttccccttcgccaatcaaaacatacaaccttgcaagcaattcacttttttctataaaaccatcattatttcctttatttccatgttctgtagtgtctaaactggcatttctgccatatgctttctcatcgtccatttttgaatgcctgccgtgacatctctttacaccattcccgccttgagcattgcgcataaatcgtgcataacacccttatgtgcgtttcgcgggaaggaagaccatgaaatttattggaaagctgcttatctatcttctggtagccctgctcattgtagtgctcgccttttattttctgctccagacccgctggggcgcatcgcaggtcagcagctggatcacggtgaataccgattacgagctcaactttgacctgatggatcaccgcttttcatccccttctcacatccttctggaaaacgttaccttcggacgagatggcaaaccggccacgctggtcgctaaaaaagtggatattggcttaagcagccgccagatcactagcgcgttctgctgggtgatcttcacggtttctttattaagtttgtccatcgccacgttaagcgtattcacgctttgtttcatctcgcggacttcgctttgctgtgcgcaggcgctgagcgtgaacaggctccccaccagcactattttcaggtaacgtcttgtcattgcgtttaattccttgaaatcacagattgctgcaatggtagacaggatagtgccgtcaggcatagatcctttgtctcaaaaagctcttcctttgttgtcgggccagttcagggtaaaatagaaatcagttaaccagataacagggacatcgtatgcattgcccattttgctccgctgtggataccaaagtcatcgactcacgtcttgcacacttttcagcacatatctatgatgtgactaatgcatcatagctttcgtgatattatagtacaccttgtataatattgtaaaaatactttataagtttttctttcacctattcttattttttgctacttgatttcttggttattactttatgagtttaaaaatagaggctctttatatatagtcatttttttaataacttcattagttggatgtggtaaaagatggttctgtgagttggttaaaatccatttaaatatagtacctttttaagtaggtataaagcccatgattgaaccccaatcagaagatgttattgcagcacaatacctgagaatgtcgacagagcatcaacagtattcaattgacaatcagaaagcagctaagcatcccaagagtttcatttccctgggtaaggctgatcaccttctgacacatgctcaggatgctgaatacgttgccgatatcattatctcgtggagcgaatgttacctataaacagagtaaatgcgttcaaactcgtagcgctgagggcgattttctgcagagatcggacgctgtttatgctggactgattttgcgataaaggcttaggccgatgcatacaggcggggctgaataagggtgaggcccttgggcgagcatccttcatgcaccggctgaatgaaatcagggatctgggggtgggaggatcagcgttaccacgccaccggcgctgacactacatacggcggcgagaacactctggaatggtaggctggggttaatcttacttcaccacttccatcagcttaccgaagctatccactacgtcatacttcacattttctggagcaaacttcttattaatctcatcaaagaacttacgggcacatttaatcttggtggcttcaacaggccgtaaatccagtgacgacattgagcccttggtctcagcaacgaaatacacatgtttgactgagccttctttgaaggaaatggcccagtcggggttgtaatcaccgactggggttgggatcagaaaaccacgtggcaacttggcatataccaccacatccttgctggtatccaactcttcgacgaacttgcgctcaatcgcagagtcggtaagcacgtaataaataatgataaaacattcggtacagaatgtttagataccttaagaccaggtgatttatgtattcgtgatttgggttatttttcattagaggatttagatcaaatggatcaacgtggtacctattatatttctcggttaaagttaaatacgaatgtatatgtaaaaaatccaagtccagaatactttaaaaatggtgcactaaaaaaacaatcggaatatatacaaattgatgtgaaacagattttgaaacaactacagcctggagaaacatttgaattaaaacatgcgtatattggcgataaacaacaactgtttgcacgcgttatttttaatcgattaacagataagcaacttcaaaaacgacgagcgccgtgtacctgaacttgatatccctgcagtaccatccataaaaaagggaagctgtcagatacaggtattgcgcagtgcctcattgagtatgcgacttgatgaacataaaaatatgccggaaattgcgccgaaagcgcgactgaaacaggatgatatcctgcgcagtctccatctgctcatcagtaaggcggagcattatatttatatagagaatcagttttttgtgtcggcatttgagaaatcatctattggtgaaaatgaacccttgagtccagtggcaaaaagtattacccctaccctgagtgcttgggcaacccggctattgccggacgatgaaatgccgcaaaacccggtagcggaatggctgggacagccgatcgtcagagtaaccacgaacaggatgagtttgagggtgatagtttaactggcagtaaaaaatcttgatttaggcgcgtcagttagcgcggtaacgttaactgacgcttccactaaacacctgtaaggaggtggataatggctgattataatagctttgttttggaaggaataaaaattatttttgccgataacaacaaggagtttattaaagagatttgtgaaccattgataaatattctatgtatcgaagagtattattctgctaccggaatttataattatgatgatgctgatgtgcaaactgagttacttaaaaatgcattaagggactataaaatagctcactagtgagaagaggcatggagaaagtgagagagtattgtgattccagtacgataaaaagagcggagaggttactggatcaagattattcattgttcgaaagctcaatatcaaggaagttgagagggactttgatgttaaaggattccttccaacgttataagggtaatgcttcaccatttatattttctggatattcacttatagtaagatgttctgacggaaacccgcgtcgtctattacggttattcaattatcttttctcaaataacattgattcttgtactgagcttaagcctctatcagataaggaacaaggcgcgaaactaaaagagttttcatactcagagttagatggtttaaacctagaggggaagggaaagaaactggctacagcaaccaagaaaaaatacgaacaagagatcgatgttcgcgtagaaatcgatcgtaaaagcggtgacttcgatacattccgtcgttgggtaatcgttgaagaagtgacccaaccgaccaaagagatcaccctggaagcggcacgttttgaagacgaaagtctgaacgtgggtgactacgttgaagatcagattgaatctgttaccttcgaccgtatcaccacccagaccgcgaagcaggttatcgtgcagaaagttcgcgaagccgagcgcgcgctggttgtcgatcagttccgcgatcaggaaggcgaaatcatcactggcgtggtgaagaaagtgaaccgcgacaacatctctctggagggataaatccattttcctcatttaaagtgattgaatcggataatatatccattgcaggtatgaggtaataatcaacaatggtcttatttgtactatcaagtcttggatataacatcatgtcgcaaaaactgacatctttaaatgaaatacgccatcgaagctttccgctggacaatcgctgacatcggacagcattaatggaaagtacgaattcttcattaacacaaaagcgattaaccatcccgctatcagttacccatccaccaagtctgtagatagtctggataatctgttcactaaatgcagtgtttattccggaaatattttttttagtttcaaaccacgagtagtctactctaggattcaacacttaccaaaaccaaacacttttaccatgggaaccctcgcaacgcaattttgtattgttcacgtattactgattcagtagtatcaccatccagagtaatagttggatatttactgccccataatcgatgccatatattatatccctgcgtttgcaacgtaaaattatctgcaataatctgcgcctgttgctccatcgaatgttcacttaagagacgaccatcaagtatatagtgatagctcaccatccagctaaccaatcctctgaagattacattcatccctttttcacgttgccagacatgccccatttcatggatgaacatatgttgaagatcgtctgtcgtctgggaaaaatcatcgcggtagagagcatcagcgcgtgagacaggttgttaatatcctcagacgtacaggcgaagtgaataaattcagataccgcgtgcagggcagggacgcatgccactttctctttcaggaagtattcaactgctttcacgtcgtggttggtggtgcgttcgatggttttaatgcgcgcggcatcttcttcgctgaactcagcaacgattttatcaaggtaatcgtttgcctttgcgtcaaaagcaggaacttccttgattgctgtctgggcggccagcttttgcagccagcgtacttcgacctgaacacggaacttcagcaggccatattcgctgaagatcccgcgcagcgcgctgactttatcgccgtagtgtatgtggagtgacttgttgttactttgttttctttttatagtcatgtgaaagtcattgcgtagtgatgttttatgacgcgttacgcttgtctgtgcgtaaaaatttacaaaacaaataatcttcattgctatagggggttataagcgaagcggttaaggcgtagccagccgcttacgctgacatggcttgatcgatacctcagttaaaactactgtatataaaaacagtgtggaggtgtttatcatgatctttttcagacccgcagagttgcgtgaaatcgttgctattccacttttcagcgacttagtacagtgcggcttccccagcccggcagcggattatgtagagcggcgtatcgagaaatttgtacgattgttgactataccgtttaacgctaatatacgtcattaataaaaataaaggatatactccgtaaaccactctaaagcctaaatatggcacgattgaaactattgagcatatagcaactatgttaataataacatttaatgtaaggacatcttttactaagaactttcttgcaaaggacaaataaacaaaaaaagttagcattaaatttattagactaattaaccttacgataaaatcatcactggcatatggcatatatttataaattgaagctttgaaacttaatacacctggcacaaaatctagatatgccgttccaaataataagaatatacccattaccattgaggagctgctcattatagtaagaacctgtctgacaaagttttcattggtcaggcgaaccttatccgtcatggttatcatcagggaggaaaagctggatacggaatgcgaagactgcttgtggacgagaaaggaaaagcaaaagatattttacgggcaggacaacgtaaaagccttcagactgagcgagtcattctcattcctggacctatagaggaagttaatgttgtcaacagaattttcgatatgcttatagatgagaacaagcctgaaattgtcattgcatcagagcttaaccgactcaatgttgcagctgaagacggatccaggtggactcgtgggaaaatacatcacattttgactagcgtggttgtgccgccttttccattattcatgcgacactcagctgcccagcaggagtggctgagggttaataacacgctcgccatggcaaacgccattgtgcctttcacggtgaaaccctgtcttataaaattgaacattctcatcctttttcctgttctgattattattcgtaagtgacgtcaactaatactttactggtaacgacaccaccagccactacgccaatattttgatatcgggcatagaactgataatccgttaaaaatgcagtatcctgaccgcttacgtcataagtgatttttgacgtgccgtcgttgtttaaaacattctttttatatctttcagagaaaacgacgacgcggaccagcaatcagatgtggaaaaaaagtcacaaataaagtataattaataatatcgaattctttaacataacctttatagttatctaccaagaaggctatttgtgtaaaggtatagaagctaattcctattggcaatattatcgacatagtatggaaatcgcttcctgataaagcgtttatattatccaggaagaaattcgcgtacttataatatccaagtatggctaggttagtaatcacacctacacttaagaaaaactttttagctctcccagttttactggatattaggacgccaacagaataattaaatataatagatccaaccattaaagggaggtattctaagctccaatcacctatgacgtaacgtgtcgcgttatctcccctgccacgatgctcccattcttcctgagaggaaagtacatttgctaatatgtcataactctcaagaccatccattgcaacaccactataagactccatcgcaaccttaacttgttccgcggagcccttgcggcgttttttcatccgctgaatgcggtcactgaaagttgaactagacattagcgatcctcttgattgtcatggtgccataagtagctcggccttgagcgttgaaataatgcccttcagccgttaataaatcttcatcaaaccagaattcagcaaatcctatatgtgcatgaaggtgctcttcgcccatttttgggtgagaaaagaccattatggatttatcggacgaagttggctttacaatatttaaaactccaggacaagatgagttattcattttgctaaagggaaaatgacatgcataacttatttggatttaacaatatatttgagcactctaatgctagatatttcacgtctaatcaattagctgaagaatttgtttggacaccagcatttgaatcactaatttctaacaaaaatcatataatactaggttctagaggctctggtaagactgctctaattaaaatgctttctcatgaatgtcttactaagttaaatgatgaaaaagcaagaaaaatagtaaatgaacgctcatttattgcgacgtacatcagcagttcaacctcaggtctgtggtgcagacctcacaggcggtaccgaaaggtgccgcttttttatttgctggtattgatgaatttttatacgcgctggcgttgacattcgctgcgtctgaataaatgataaagaggctaattgttgtcaccgacaactgccaatgcctgagtgatttgagacaggcgccttcgggtaatcacatgccaatgccacataaacctgcgagtggcgccttcgggtggtttgttaaatctgtttaacctctgagaacaggtgctctttgcgggttgaggtcttttcaacgtaacgctgcgagtctgtcgaaccatgccagaaatcgcaccgtttgtccccagctcttctcaggggatgggatccgtgctgaatctggtttctacagatgggcgtttcaaagcgcgtcttccggcaactgatggacaggtaaaatcacctgcctggtcgccgtatctgtaataataattaattgattactaaaggaatcttagaaatgcaactgaacaaagtgctgaaggggctgatgatcgctctgcctgttatggcaatcgcagcgtgttcttctaacaagaacgcaagcaatgaccagagcggcgaaggcatgatgggtgccggcaccggtatggacgctaacggcaatggcaatatgtcttctgaagagcaagcgcgtcttcagatgcagcagttacagcagaacatcctattttttcttattcccccttttcgaggggatgggcaaaaacacccaatttttgaacatttactacagctacacccatttgtgtattttttggtagatatgatggtatattattttcattccataaatccaatttatacagttcttcttttgcatctagttctaaaatatctccacttgcaatatcttgtactaagctatcaaaatatgattttttgattccattataacttccataactacctaacttacttcttaaattatgattaaaccctgaagtttttggtggctctacatgggattcagccgagatacgtgtaaaaatgggtcatagcctggaattcgtttcctgattgagaagataggcggcaaaggccagcgcagcacccaccgcacaccagggggagggggtggtaaacagcgctttaagccggggatgaataaatgccagcgccccaatcaggaagaagggaatgtagaacagggtctgcatcaccacgaaattaaacagcccatcgctcagaatgggagggtagacaatgagcagggtacgcctgatggcggcatacgcgacccccagcgcaagaaacagcagcgacagcttgcccagggtgatgttggcgaagaaggtcgaggatgtggtgctcgcgcgctgacgcagctggctgaagatcagcaaactcaccgtggttagcaccaccagataaatgcatgcaaccatcagaaaggtgaaataaaattatcactcatctctgaccggatatatttattccagtttgaatatcaccagctgccataggggtaggttttacctctgataaactctttaatgtcttgatcatatccatatgaaaagtcacttttagtcactcccttacacatctgcattttgtcaccggatacggtggtaattttggcatctgactgagggaccaccggattaccacgatctcccagccagacactcaccttaccctcaggagccagaccaataatcatggttgaacgatagtaggtttcgtcccagcggctgtctgtataaggtgtggtcatctgatacggttaatgatgaagatatcagtaacaccatccgtgctctgtttgccactggcaactttgaggacgtccgcgtcctgcgcgatggtgatacgctggtggttcaggtaaaagaacgtccaacgattgccagcatcactttctccggtaacaaatcggtgaaagacgacatgctcaagcagaaccttgaggcatcgggtgttcgtgtgggggaatctctggaccgcacaacccttgcagacattgaaaaaggtctggaagatttctactacagcgtcggtaaatacagtgcgagcgttaaagcggttgttacaccgctgccacgtaaccgtgttgacctgaaactggtcttttctagatggattagtgaatgtaaatgttagaaacatccgcttctggcacaaagcggactttaatgaccgaataccatgctaaaagtcaggacggacactaagggtaaagttgacgggtgtcgcttcgtcgctgatccgccgtcagactcatttctccagtcaaagcaataattaccactgtttatttccagtaagtcaataattccttaatcgcaataattaacctgaatttgtgattattcagcagcaatccttctcctcctctcaagagatccgaaaaataccagtttcggatctgaatgagagatatactcaatttttgtcgatgtataatcaaagtttgattatgcttagccttgattggattataccagtcatcaagaatccagaaatcacgaagaatatatctacgccagagaatcctcccgagaaaaaaggggtgtcaaaatgataaagtacaactgatattactgctagcgctctcaatccgttaatatcttttctaaaagtaatcattgttatgtcttgttgttcagttagtaaaaatcagtattttcttattataacatcaaagaaagtctggatcgacaggctagttttgacgtgctgttttaatacacagtggtttttttgagggttatggtgcgcgcagtagacgtaaaagccgtattcatcgacctcacagaaccataccgcccttcctaggatatatacacatttataaaaatggttttgaagatacaattggtgagctccaatgaataatcttagtctaactactgccgagtttgaacgcctactaaaagtatttggctggctgctggggctactaggcttgctgatttttcttttccaatggtattacctccatcaaccaataccctctgctgcatggaaggcattcagcttatcgcttggtctttgtgttttattcttcggggtattttcaaaattagcctggcgctggcggcatctagccaaatggatgaatcgaccactcgtccatggcgtttgggttggagagctaaggtcagactacggcgctattgacggaagaatgctgaaagcattgaagttatcgaacttcctggaatcacgttgacggcaaactttactgcaatatttttcattccttgttcctgataacgtattcttacaaggaggatatccgcatcgggtattttctctccctttacgcctgttggctccggataaaaaaatcagataatggccatcacataaccgttcctgtagtgctggtctgagtctggaaacaaggttatcgcaatgatctctcctgcatttagtcatgatgtgtatgtactttaattcattgaatgttatcactaatgattactataactggtaaagaatagtgatgtgatatttaggtaatatatataactagctaaagctttttgatattcatcttgtgctaacttattattcgtagcaaagcgatctacagaagtaatactgtcttcagttgctttttgatatcctttatatgctaataccccaacaccaacagcggccgccaccacacctaatgcaattgctactggtcctaaaactgcggttaatattcctaaagctgcacccgttacactagtagctgctgtagctacacccattgctatcgctaaagaacctataccagaaacaaccataccgattgcccccattattactccaataacagtagcaaccgctgttagcgcaagaacaataccacctgtaattgcaatgggagggtatatcgaagatagtcaagacttagaaatctatttaattcgctacaatgccaaacacgaaacagtaaatgtgccaggtacgggttccttatggccgctttcagccccaagtccaatcggaaaatgtgcccatcattcccatcatttctccttggacattgatgttggatgtacagacttaaatgaggacttaggtgtatgggtgatattcaagattaagacgcaagatggccatgcaagactaggaaatctagaatttctcgaagagaaaccattagtaggagaagcactagctcgtgtgaaaagagcggagaaaaaatggagagacaaacgtgaaaaattggcaggggcgattaattgatagcgttaatatatttcgttagctgtgagggcgcgtgggtaaagggttttggcgttaaaggtgcaacccttaaaacgctgctggtggggcgataataataattaaaatgtgcggtaaatatttaattttggttaggtttaatttctgcttaatagtaatttaagttagggtgaaatatctggtgtatgatatattttaaattctctcatttataaaatatatttttacgtgcgggttaatttctgctactccaaaaataacgtgatttcttctcatgtttaataaataaaaggccgcaagcgtggcctttcagaggcaatcggtattagagtaacaatggatcattcttttgaatcgcctctatttgtttcttttcacaatgctccaagaattcatctagtatttgttttttctgtatatctttctttaaaattgataccgtcatagcgctttctcccctcaaattcattccacatcttttgtaaattctttaattggcttatctagtgcataaacaacaagtagaagtccacagatcagaaacccagtgatacatactgaaaaaacactttcttccatcatggttatttcctccttccaacttttttacatctcagaaaacttaatttgagagtttactatattaattttctcactcagcacaataggtaacgataatcaattacagcaagaatacaaacaaggcacacaagctttacaaagattaaccgctcaagtttctagaaatgatacagcatttaataatgcttcagcagccttacatcgttatcgtaatgagctaggtgatacggaagaaagaatagagcgattgggtaacgtttctggaagattacgcgagcgtatgaacgaagttggaaacacaatgcaagaaacaggtacgaaagtgagccaagggtttggcgcagcagcagttggcgtggcggctggagttggagctttagtcgtaaatgcaagtcaatttgaagaagcgaacaagaaggtacaatctggtttaggatataatcaattacagcaagaatacaaacaaggcacacaagctttacaaagattaacagctcaagtttctagaaatgatacagcatttaataatgcttcagcagctttacatcgatatcgtaatgagctaggtgatacagaagaaagaatagagcgattgggtaatgtttctggaagattacgcgagcgtatgaacgaagttggaaacagtatgcaagaaactggtacgaaagtgagccaggggtttggtgcagcagcagttggcgtggcggctggagttggagctttagttgtaaatgcaagtcaatttgaagaagcgaacaagaaggtacaatctggtttaggattcatttcggaaccggtactcagaaaaaacacactcatgggagtatccatcccggacatacgtaatacggctatccgttacgcctgtgacagtaattttttccccgcgagaatctttccagcggctgttaagctcgatttttggttgagcgatgccctcaggctgtgcccgatttaattttttcaccatgaaatttattccttgttggtagcagttaaaccgtgtgcatcagcagcctgacgaacagcctgaataaaaccttccggtgtggccacgatttcattcggacgaaggcggcgctctgtaacctgaccgtttttaaccgtcaccagtacgcgaatctcttattttcgatattagaaattgtacgactgacaccttgtaaaccttcctgtacttcattgaattgtcctgtagcttgattctgtgcttcttgtaccttttggtttaattctgcttttgtggactcaatatttttattaacctgctcaagtgtttcttttttaacggattcaacatctggcacaaccgattcccaaactgtacctgtccatatttttaaaatgccgggctttccgttactcatatcacgccatagcgttttattaggtttaagccctgttgttggtggattcttagcttctataatttcaacagtattgtttttaatattctcttgtaccttttgtttcctgtcagtttcagagatagcgtcgatattatcctttcgccatggtgtgatctctttaataagaaagtaattgattgcctcagctttgagtttttcagcttcttcatttgctcgaaacataaccacactccaacataacattattaacttacgcattatctataacatatatgcgtaagtaaatggttttatgtttacaataaaaaggtacggctacttttgcacaatcaggggttctacaccggaaccgccgaaatttccgacacccactcgcagtcaggcatcactgagcgctcagcccccacaggataacccagcaaaaacgaaagagagtcaggcagaatcaagttttccgtacacaggaaatgaggctatgtctttaaataacaatccagagaaaaaaagcgggacaactttccctttacactgtttacctgagcaattaaaagagacagttgaacgtgtaaatatgtttacaggaatgtcaatggaactgatggtaaacattattttcaccatgctttcaattatatgccagtaccttgtcggtgttgtatcgccttactcaagtatatctgggccatgctctttataccttcttacgcttgccgagtctggtgagggtacgacatttctgtcacgactgctaatgagacccgtttatagtcgattcgagaaggtatagtaaaacaccacatcgctaggatgtgtttttttgtcatgagcctctaggtcgcaatcccagttcatatcttgactagtagctcgttgccatttgaaaattttaaaaatatcttgggttatcttatttgcaacatgctgtattgaagaggtctctccgcccattttcaacattcctgtttagtgtgtgtaggtaaaactctgaatcaaaaatcattcaacaatatgaattacatcatattttgtaagtatgtctagtgtgaatgaatttgcatgtaggttattgtgattaaagttgtattaaaacgaacgcagggcatggtgttgtaagtaaccctgatgacatacctaatcaaactcgaagatgaaacttgccccactgccactttgtaggtatacgcttataaactactgtagggcaggactgtctatcggggcgggctcagtcaactgcgagtgctaagtcgtttattgcatgcgctgccgcttttttgctttgttttgaattaaaaaaacgataagatcttagttgtaaacacagtatatcgataattaattttacactggttctatatctagtgtcttaggctttttggttaaaagttgtacttctatagtttgtgagtctttatgcttcagctggtttggctttttcacgtttaaacctcactagtacgttttcgattgggaatggtcaagttcttcggggtgattttaaatatgtatattttccaggcggcgatgttatagatgaggataaatctattctcgaagaggataagttcggagatatcataccttttaaaattgaattcaatgatgatgcgcttgaatatgatatactttcgttgaacgacacattgttaggtggttttattattgttaaacaagaggtcaaggaagttatagaaagtaaaggcttccgggggttgaaacttgttccactggaaaatgctttagacgttttctgtgaagattatttctacgaaatagactcaaatcgtaaaagaaagggcaggtcatgaggaacggaataaaatgaatattcattcgattgatttgcatcgagatggagaaacggtaaaagaattttatgcagtgtctcctatcgatgtggaacaagaagcgatattatccattgaatttgaagaaatgacgagtgtacttgaagaaaaagaaaagtcaattattctgcacgtcggtgaagggtataccacaagagaaattgctgtgaaattagagatgaagaaatctactgttcaaacaagaaagacacgggcatttttaaagatgaatccagattataagccaatcaaacaaaaatcctttttcttggggaaaagaatgataaagagacgatgtttttgatcgcggttgccatcgcgcgcttcctgattcagttcttcgcgcgttttgcggcgtgcttttgcagggcgtttcgcgcccgcagcggaggtcggttttttcatgatgttttatctttaagtcgttttcttcagtatagaattgcggcgaaatctagcagaaagcaagcaaagaaaaaaggcgacagagcaatctgtcgccttttttcctgactcacaacccttaacgggtcagacattccctgtttgcctgcaacaaaccctgtttatcccttggctactaccgtccgtgatacggttccgtttcctgttaaaaacgcctccaggcgcgatgaatttgacctgatccgtagcgaggagcagcgtgcccgctttggtgttttgctcaagcagttaagcgatggggatgtacccgttcgtatcatcttcaccgggattgggcagtcggtatccgatttgattggtggacatctgtccagtcagagacagattgaacaggttgatcttgaacgtctacactggacaggtcgtcagcgtatcgttgaaagtgcatttagatattttgatattaatatccctgatgatatcgcagaccgtatatgcgcgttgagtgatggatttccctattatgtccatctcatgtgcagcaagctccttcatgagtgtaaacacgagctaaagtagatgttttatctcgtatggtagataaacaaaaagagaagatcagggaacttcaacaagcctataatcgtgctaaaactgaagaaggtgaagcaagtcagtcagcgcagcggtacgccgaacaaattcaccgggcaacaggtgaattaaatcgatttgaaaacgaattacgtcagtcgaaccatgaattagaacaacaaggaaatcgtttattaaacttcggtactcgtatggagacgttaggtaatcatttgcaaaatgctggtatgcaaatcggtatggtgtttggcggaatgacttatgcaataggtcggggtttaaaaaccagaaatatatattttactcatatcagactcaggaaaaggattttcgcatttataacactcttctccaattacatcttcaaatggatttaacatgtaaatcgctcctatgatttatatttgtttagcatttcttgcaatctctcacgctcttcatcaatagattgcgagttttgcttttcaatttcttttttagttggctcaacatcttcacgtaaccaatctggaacaatttcttttctatttgaacgacctggtcccgaaccattcaatcgcttattcttactcatttcaaagcgtctatctaatgcagcaacatcatctaatgtttttaattacatggtttataacgaaatagggatgtcagagcgtacttatcgccgttggaaatctaaagcattttataagcttgcttttgcacttggattagaagtttatgagacagaagagactggaggtaatgaataatgaattttgttcagccgatacgtgatccagaagaaatacagcagctaaaagaatattttaaagaaaagagcttacgtaattacattctcttcattatgggaatcaatacaggcctgagaatctcagacattttgaaattgaaggttggagatgtcaaaggtagtcatatatctatgagagaaaagaaaacagggaaacagatacaggatggtgattatctgagcactaaataccgcgaacgttaaaacgcacagcgaaaaatgctgaggttatccataagcaacgcgaaaaaagatcaaactatatataaaaaaatacaatggattatgtcacaaaaccgcaagcaggcagggggaagcagggctaaggggtattttgaggactcgtgcggggtaacgcgttaatgcaaaaagggctaaccttgcggttagccctttttagaatgtggtcggcgagagaggattcgaacctccgacccactggtcccaaaccagttgcgctaccaagctgcgctactcgccgatgtactgctttttactgttcccaggaaacagatatgtatcctgaagacactgcaaaaaaacaatggacagcaatcgaaaacggacttatagaactgaaaactaaaataaatatgtctgactacatcaggatatggtggatgtccaattttggatatattggtgaagatcagttatatcgttcatttaagaaaaaaatagctgacaaaagcacgactgttacaccagaatcatttttaagtcagatggaaaaagattcatcgctattcattaaaatatgcgatccacaggagaatgactggccaggtctgaatcagagaaaaatatacagaatcctgagaaatcttcattacttttggcagctcatcttttttcttatagatgcgcaggcctgggcggctgacacgctgaatgctttctacaacagctttaccctggaaatacttgagagtaagttccagttccggcttggtgtcgccttcaactttaaaatcttcgataaaaccttcttccttcagcacgttggcaattgccactttcagcttggcggaaggcatggtgaccgcaactttgttcgcggcctgaccgttacggatacgggtcagcatatccgcgatcggatcttgcatgctcatctgtctttactcccgtgattcaattggtaattaccagctagccattgatagcgtatttagcgaaaaccaactcatgcagatagacgatggtcgcaagcccaaaagactgcagaccaacgccaactttgaaaagaaggaattcaaggcgctgtgggggcgaatcaatcgcaaggctacttacaacgtggtgtttgatgatgttgagctagtgaaaaatgcgatcaaggcgctcaatgacaagaatgctgggttgcgagtgatgccgttgcaatacaccattcaccgtggcgagcaggctgatacggcaacttacgatgacctcaaaaagggtaatgccttcgagttgaaagttaccgaaacagaatcgcacaacgataagccactctgatggtcgatgagtaaaattacagcgtcatcagtatcaatcataccgtttgtagcagccatatttctttcctcatgatttcttttacattgccgtcaactctcccggctccgcgattttacatgcacatggtcagggtataatgcattgataaatcataatgaatagtagttcgatccggtctgaataccgcatcatttcaggacaatttctggcacggtacgctgagccatcgacgctgacggaaagccctcgtgaggagaaaagatctttacaatgccgttatgcggccattcgtattcgttcggctgaaggcaagccgatgaacggttaagaaggcgatatgttaatgcagcgctttttaaacccgcagcagccccggcaagagaaatcgcatccagggctgtgttggttgctgtataccactcctgggagtccatccacgcaacgtaatcatcatgattcatagcgatcaacgatagtcggccaagcccatttgcacattgaattccagttgctacaccaccggctaaaatcacagcggctatagcaccggaagaccctgcagtgagaggtatagccataccggcccctgccgcaagtacaacagtaagaattgcggctccgcaggaaattgccgttgaaccaataggcaaacaacactctcattctttctacagggaaggatttagaacggttgatataactaagatgaaaacacaagaaaataacatcgacaacttgttagcctcaagagttcatatgtcaacaactagtcttatggataggttgtcagccaacaaatgtgaacattgtggtaaaaccgattctaacttagtaatgcaccatgtccgaaaaatgaaagatgttgagaaaggcaaagccaaatggcaaaaattaatgattgcccgtagacgcaaaacattagccgtatgtgaggattgccataatgaaattcactatgatatgagagtagaactgtccagatgatattttaactcgtgaacaaatggcacaagtgcttacaaatgctttcaaattcaaagctactaagacaacatcgtttactgacattgataaaaactcatgggcattaaaagcaattagcgcattagaagaaaatggcgttactattggtacaggaggtaatatgtattcaccatatacacatgtaacccgtgaacaatatagccaattcttatataactctattaatgcagtagaaaaagaaacaaaaccagaagtgaaaccagatccaaaaccagaagaaaaaccagaagtgaagccagacccaaaaccagaagaaaaacattccctgggtactgcttatccacgcgtacatatcggcattactgcgaagtgataagcgacgcattgcactgtttttctgtgcgctgatcgttttattacttttattcagtagtgtggcaatttggttgattccccaacctttaccgagtaaacgcaacaccttgcgttcagagtgagtgagtgcaatcatttgctcactctcctcttcaatatcgggcgtttccggtattaataacgtctggcttattcgctcggcacgttcactgcccgcgcgaatagcgttaatgacgccttcaataggctccatatctgaaagcagcgtgctttcttgtgcatgaagagtacaatgcttcacaaaaaaccattaaattaacgtggtttaatcctgcgagaaattcacgattctgcaacgtaaatttgcttggtatgcacacgtgacaaagtaaaaattgattctaagattgcggtagtaaaaattatcacatggaggttccaatggttttcattgtggctttaactttatctcttcttctttgcgtagcgggccttatcttcattttgctggagctagttagcataggctgcaaccctcaacgactttgaacgatacgtgcaagaaatccagcaaaagcattgattgaaaggcacttgacctccaatcacatcaaggatttgtttgataaccagctggcaggcgacgacgtcagataccagttcctgatcggcgctcaggttttgtgacatggggttctccttattcaaaggccgccatagtagcaaaacagacgcccttccatctccctctcgtcgtccgcagacataaaaaaacctgccgaagcaggtttttttatcagaacatcgcacccggtgggacgtctttaaacgttgtgcagtagtttgcccacatgcttttcaggattttgcgcagtttcattatgttgctccagtaacgtgttatgcaggtgttattgtcaatacgcttaagtcagttttgagatatgacggcaggtgactttcactcacgaaccagcaagtggcgtcccctaggggattcgaacccctgttaccgccgtgaaagggcggtgtcctgggcctctagacgaaggggacgtacagtctcaatcgcaagacgccttgctatttacttttcatcagacaatctgtgtggacactacaaaggcaggttctttaaggtaaggaggtgatccaaccgcaggttcccctacggttaccttgttacgacttcaccccagtcatgaatcacaaagtggtaagcgccctcccgaaggttaagctacctacttcttttgcgactgatacgtaataatttacctcttgtccagccagaagtcgaatggctcttgacgtgtaattcatcttccagtttataaaagcttaacttttccccgttatcccatgctgtattaaatcgcttaatcagaaaccggacttcttctctggatatactgaagcactctggatacaactcgtggggttttctgtttacactcccgtcagtatcgctgatgctgggatatactccacgatcccaggcatacagataactgtcactgaactcatcaaaatgtttcccaagatgaagtatctgaagtttctgctgtacaaacaacaattgctttcagcaagtgctccatcagcaaatgtatttaaatcaatcatgacttccattacttttctcacctaaacctttcttattaaaattcaacatccacttgaatatcgatgttcataggtagttcttgagctacaataattgaattaggactcgttccttttttaatcaacttttgaactccttcttttgcggcatcctttgttttgtatccaaaaacatttggtgtactggataaactcgtaacaattactaaaatttgttgttgcatgattgctcctcctactgaacttccgccatatttatttgtgcatttgtagctgtaattaaagcattaaaaagaggtcagggcgctacgtgattatggtaaatatccattaaccgcataagcgcccgctctcagggttgatagttttacagcctgattattaccaaatatccccttcatatcagcccatcacttattgtcatgatgaatatcttcagagagattctttctaccgtttatcgaaaaacgcgtagtcatttattcgccattcctgtagcagtatagtcattactgttttcaagattaaatttgtccgatacaggattttttcatattcaggccatttattgaattaaaaccttatttctctgcgctgttacggggttcccctttgccatttttattgcagcggttgcactgctgtgctggtttatcgtcggcggatacgctcttccgggttagtgaatggtttacgggtaaagccagtgcttgccgtcttccctgtccagagaatgcgaagtcagtgtccgtttcagcctggaagcgttcccttaatgagaaatacgaccgactggtaaaccggaacccgtacaatgtatttctgtcgctttttggtgcgggtgaaatcttcagaaacgactgatgagttaatcatcgccatcgaatgacgttttttgcaccttatggctgttctgcgcagctataagcacaaacttttttacggcagatatgcagcctgtgccagtgagtaatagactactgcctgcggtatgcataatgcacttttgctgctgacggttttatgagttattttccgggctgcttttttgagcgccgtattgaatgctattgcagtaacaggcctggcgatggctctgactcgcggagaatggctctggaacaggtaaatgtcatcaggatatcgcctgcgacgctgaccgatgataacgcgtgcaatggggctgaggataattcgtttctccgcaaatacattatgtgcgggtaataccagaacatcctcctgtaaatctgaagataagtggaatacagttgaaaaattcttcagcactataaatctacgttccattggtaaatccattatagaaggtcttgaaaaaggtttggatgatgcgacagatggtttatatagtaaggcgaaaggcattgctggagagattaaaaagactatttctggagcactagaaattaacagtccatctaaagtgatgattccagttggtagcgcagttccagaaggtgttggcgttggtatggataaggggaaacgatttgttgtggatgcagcaaaaaatgtagttggaacggttaagaaacagatggggaatatgccatcggcgagacgctgcggacccttcccctcttacgccgtggacgcattgatgcgtttatcttcgccggtctggtagtcatcctcatttacaataatgtgaccagccacggcgcaatattaaccacatggttattatgtgcgctggcattaatggcgatttacctgttctggatccgctcgccaaaactcatttttaaaaaacacggattcttcttcgccaatgtctggatagaatataaccgtattaaagagatgaatttatccgaagacggggttctggtgatgcaattagaacaacgccgcctgctcatccgggtcagaaaggtcaatcgagaagatatcagagcccttgttaattctaagggcttgaacaggtaagaagtaaggtggtttacgctcagggatagactttttctttgtattcgcagagatcttcgataatgcaggaaccgcagcgtggcttacgggcaatacaggtataccggccgtgcaggatcagccagtggtggcagtccaccttaaattccgcaggaacgacttttaacagcttctcttcaacctcttccacgtttttacccggcgcgaaacgggtgcgatttgagacgcggaagatatgggtatccacggcgatggtcggccagccctctgtacaggttaaagtgaatgggaaagatcgcggtacggccgctgcacgttttaatgaagacggcgagctctgtattgataaagattttctggattttgccgggattatgcctgtcccgctcaaggctggcgaagcgtgccatgatatccgcagcgattatgcgcaggcggttgtcaacgcattaccaaaccaggacgcggtagagctttatttaccccaggaggcaattaacagtttaacctccaatattaaacactttcagcaaggtggcacggcggggttactgaactactcattattcagtacccgtaacgaatggtttatatttttgatatcactttctgtaaatttcattctttattaccgtaaattgtagcctgcccagtctgactgtttttacaaacccgaataacagtcattttggaaacgcctgcaagacgcgctgtctcatttaatgatttaccgttcaataaacgtaatgtccttataagttcatgcttggccatgtccggctgtctccctgcatacttaccctcaagcctggccttttcaatgccctctttctggcgccttcgacgatcctcatagtctttgcgtgctatagctgcaagcatatcgagcatcatcccatttacagtctattgaatcaatcgatcgtttttatagatcaatttctcgatattgatagattttacagatcaatgtaagatcatgattcttcagtaggtgtttctcgtaagcaagactcacggaacgagtgctctgccccccgatcaagtgcgaaagaaagaaggtatccagaatgactatcctgatacaaacgttaaaaatcatggcatcaggcgttgttctcatttcatgtatggctaccgcatctaataccgtctatttattaccagaggcaaaatcagcgggtgtcgccagcagcgaccaaaaagccctgatgtttctcgggaagcatgaattacgtgatggtttaattttccgtgaatacctggggatcgatgaattagcgatttggtcgcaaatatttaattaatggggcggcagcccccttattccggctgcaaatattaaccgtgtttaattcaccctcacttacgggtgcgggtccttattgtctgaaaacagagcaggagtttatatgtcttccaccgaagcaacaaataaagcaccagccgtacccgaaaaaagcagcgtgaaatctctgaaagaggaacctgtattacaggtggagcgtcgtgattttgtcgatctggtaccggaaaaaagaccaattcatttgctggaatttcatttttgaaaaggataaaaaagccttggttagtgacccaataaatgatcgtgattattgagaatacccctcccagcttcaaagaatcctgaattatatgcttgaaaggatcattacacacagcatgggctttgcttttttgtttgcttttgaagaaaaacggaaccactattaaaaaagggagaaattttgctaggcaatagaaataaacatagctagtagaatcgaaagtgattattttaaaccatgccaaaagcatcattactgtaaatatcgtggctgttgagatcattgcgcaagtcgtcttgtgcataattaatctaaattttggatgaatttgattcaaacatagcgttattcattcattttttgaaggggtacgatcgtctcatcaaaacaaaggagacagcgtatgagcaccttcgataaacatgatttaagcggcttcgtcggcaaacatcttgtatatacctacgataatggctggaattacgaaatttacgttaaaaacgaaaacaccctggactaccgtattcacagtggtctggtgggcaaccgttgggtgaaagatcagcaggcctacatcgtccgtgttggggagagcatctataaaatttaggcatgtactggagtgcagacgtgggctctgccgatctaaacggcgaactggaaggttttgcctctcgccttattggtacagcccagctcccagcgatcttcacttacctgggtgctattacattcgacacgtccgtaatcgctggttaaatacgatccgacacggctttttgctgactgaatatattctggttctttatttgaatagatgctggccgcagcacccaccgcaaccactacgcccagaagtgatagcacgattatttttttcatttattcgatccaatccttagccagaaaaatcttattgtaaatgaaactccggtgcacgtcgcgtaatgtgtatcaaggttctgggtggctcgcaccgtcgctacgcaggcgtaggcgacatcatcaagatcaccatcaaggaagcaattccacgtggtaaggtcaaaaaaggtgatgtgctgaaggcggtagtggtgcgcaccaagaagggtgttcgtcgccctgacggttctgtcattcgcttcgatggtaatgcatgcgttattttaaacaataacagcgagcagcctatcggcacgcgtatctttgggccggtaactcgtgaacttcgtactgagaagttcatgaaaattatctctctggtgagatgcgtctggtactcccgcttgcaatagggaaaagtgaagtgcgcggcggagtgccgcacgaagtcgtacttggcgctattgctgattgtcagcaagcgtaacaactagaaaggtcagaccgctgtaacaggtggtcgttttagcttcaggttaatgcagagtcgttggcagaagcctttgagtggggtgttaaatggatgaattcaaaccagaagacgagctgaaacccgatcccagcgatcgtcgtactggtcgttctcgtcaatcttcagaacgtgataacgagccgcagatcaactttgacgatgtcgagttgcaaataccattccaccattgtcagtgcattgcttatttgacgtgcatcgataatctttgtataaataagatcatcggccgaactgtctcctgtaggtttagttgaataaaaagtcattattgtagccagtcgcagtgcctgctctattgcttttgacgcaaaatctcggatatgtacaaaacgcccgccaggtaaaatagccttttcaatttctttctgtctttcctgaagaaccatttttgcatcatcagacagtcttagttgatctttcggtatgctgtcatcataaaatcgggtttcaagaagacttaacagagagaaatcatacgctccagttaaaaataaattacgttccttttgacgtcgagtaacaagcccggataccccaccatttgtaatatccaaaaactcattcgccgcaccttcataatttgcctggttgagttttaaagtcaattgtggtgctttactcattcgtcccatattaaacagcaaactaatcaaagcatcgaattcatattgatataaatctgtactgacagatgcctttaattctttaatataattcgagagtctagattcaaataattcatcagccttagaattagttattccatttctgaattcttctgcgacagaaacagaaaggccagtggtaaaaaagcgattagcttgcttgccactggcctcccagttaccccgttgtgcatgtttacctttacgtaaataactcccttttcctttcttgttcttctcaactcgctgtctgaaaagtgggtcgtgaagcaatgcctcaatggcgttatccttaatgtgtcccttagtatgctgatagcggctcatcatttctcctgagcatagttaatgtcggcgggagtctagtccctggctaataaaaaatcaacaaccctgagcttcactactggcaccctgttcaagtgcttccagatgcatctatgtataattgggatcgtgctgcagcagaaagagcagatggtattcaaccgtttaatgcacttgctgtaggtggtgtgaataataatataactccagcaccagacggacaaacgtttgatataagtactgaaaaagaagtgaaaatctttaggaatatacgagcaatgcaagggattaacttaggtggcggtggattccaacaatgggggcatattcgttttacagacggaaatgctggagcgggtttttatgtgagtactccaagtggttggaaatttaacgcacttggatagaaaggaaggattaaagcgttctccgcccctcttttgatggtttacgctgatcatcaataaacagggacagcacttcttccctgacctcctcatccagccgggaaaagtttcggtcacgtaaaatatccagagcaaatttcgttaaagaatccatatattctcctgattgttgaggtactgaacacccgaaactcaaaaaaagcggcttgtccttcatccttttttcggcccaaaagccccggaatccattaatccattgaacattgtgcgtaactgcttaaccgttagctggttcagaagtagcgacgaccttgccccatgaggagacccgtattgtaaggaattatgtgtagaaggagattttatggcacagctattgatttttgctgatgatgagcctgctaagtttctgaaaattcgaagttatcggagcaagattctttatctgtatgctaatgatgaggtgaggtgtttggatgtggtgatttttttttcaacttttctgaaaggcgaaagtggagccatattggtggcagccgacagatacgtgagcaggaaagaaattatcgaggcttatgatgctctgattggttgaaagcagcgagactggcgcgtagcagtaggatggggcatgcttggttctatacgtatgtgctgttactcacaatttgccaggacgctctgttttcagtcgcaccagaaaactatttatatctttataaatcaaagatttatcacaataaaaatacgcatttacgctgacattgatcaataaaaaacgcggtaataaatttattttatggcaataaccagcgtgaatttttttgccttaaaaatattaataaaggctatctttcaggcaattaaagattaataaaacaccattattcctttaaaacatttttgtggtttatcaactttaccaggagtatttattcactttccggttaaagagtgggatataagtgcaaccaggtgtgaatattctcttttgctgttacaggttgaacttacaggcaaaaaaaaacctgcgtaaaacgcaggttggtgtaaatcgtgttaatcaaccgaagttgattccacctatccatacctctgggatctcgactctagcaattcataacgcatcgttgctaacggacaatcgcaacagcctgaggcaaagtgtaactaaaggttcagattaccattattcagacatgactggccgtgtaacgattacaccgcgagggatgttctgcttcacatttgcagaggacgctcacccgctccccttgaagattaatattaacttctctttcaataagttagtggttttctgaaaggaaatcccccgtttcgcctggcttacattgctcacaaggtgggttgtaagacgaagcagaatagcggattctatctgtgtcgacaggatgccgacacgagaaacgaacatcaggatgatggcgtttcttaccagggacacgtcaggatgacgccgcaggaaggcttcaggatgaagcaaagtggatcacgcaggatgcgtaagggacacctccaggaaggagaacgagagccggtcaggatggtcggtgggtcaggatggccaggacgtcgaaatcactcagacgataagcgggaacaccatcacgattgattttctcagaccgaatgcaaccggcacagcgtacgtttattttttctctattttcccgcagacaaaaccagactacgggctggctgtgtgggatgcatcagggacgctgattttaacaaacgaaacgcgcacgctgagcgatgttgtcaccctcggtaccgccggggtggatgccagctcaggatacaacatcaatacaactctggcgggaaagtgggcctgcatgcctgccatgctgggactaattaccggggttgtatcggctggcggaacccggatataatccgtgaagatgtgttaatccggttgtgcgctgctatcagaccggcccggactaaagacgatcaccggatacgccatcgcgacctttgccatactggtagcaaataatactaggaagtttaaaccgggtgcctgaacccatacaggaagagtcagtcagttgcaggctggcttatgtaaaaagtaagcgtggcgccagatgtggtacttttttatatcacccaaggagagtatgggaaattgtgaatcctcagatacacctcgatggccttcaagaaaaaacctcctttcggaggttttccctgataacatttcttttagctcttgggactcaacaatctgtataaagaaggcaccatcaaatgttgggtggtcatttaaaatcaaatggctataaaaaaatcgaatttcaccatttaaatttacaggaaaagaaatttcattctcatcgtctgtatagactatctctcccatatttaaatcattcattttgaatttgttaacaaagtcttggatagtattttttatatgcattattcctctttaagagttaacattattggctactcttaaaattactatgacccatagttgaaaaatgtacccataatcaggggtaaacgtgccgttggccggcgataaggcaaacgagggtgagaacgattgatttcgcacgcaaaccaggacggcagcaggccgtaaagctgaacttcttcaaagtgattcttcgccgcctgtgctacctgctggcgcaaaaggggaatccagatgtgtaactcaacgaaatgcgggtactgcggcaagccggttaacccggaggaagtagtcaaaagtacccttctctatcgcaacggcgcacagctggcgcgcaaagaaaaagaatactgttctgaacgttgtgcttcgtacgaccagatggcccacaaggtttccttgatgactaggtagctctaagaatgggagcttgataaaggtcttcgcagcaaaactgtattgtgtggcaacaagagggttttctttatattcaagaaattcctttttgtcagcaatcacagataccagtttgtcgtaggtgaaattggtgattgcactttcctccgcagcactgtaatagaggacatattttttataaaagtgtggatcttcctcaattgcgaagatttcttcttcgtgatccttaaaactggccagaacatcaaggcgatgaatacaaatcaagtcgcagtatttccatcgagctttttaacagacataaagcctcccgatgatgttacagcgtacttcaatttcctgatttaaatagcaaaaactcactgtgcatttgctgcacaaaaaatcgccgtaaatggttagccagttttctggtctgagtggggtgacgttgttgtctgctgcccaaagtgcgcgagagccggtgcaatctgcccagcttcgggtgttatttgatcagtcataaaccacatggtgtatttcgtgaagcgcggatgctggaggattttcatgatttgttcgactcccggctttttgtcaccggcttcattcaaatatttttattaatgatttaataattgttaattaatgaagctttatgaattcatctctcaattaatatcacgcgacttgaccacacaaactttagacttattattgcctggcaaatgcacataattttaacaatggcgtaataataatatgaagtatctcattgatcttacaatgctttatgaagtcgacaccggtatgatcatgattaatggagaggaagagtcatccattaagttatctaaccaggcgggtcgtctgctttatgaacttatcatcaataatggtaaaactctcgacagagactttttcataatttgtttttataacgatttcttgtataattagggaaagcaaggggtggtttataaccaacccgcttgcttatagattgagcgaagtgtaccttttggaatatccttgcaaggatgtttcacagtcactttaccaatcttagaaggatgtttgaactgatggtggctgccttcaatgttcactataaaccatccttctttttttaacctcttaattacttccctactagaaatcgttattacctcctcgtatgataaagttaggttttttaggaaagggatttacctataaacccgtgaccggctacctctgccgccgcacattaacgataaacctcgggccacaagcctaagcgtaaacataagaaggggtgttttatgtcatccgatttcaagatcaaagtgcaaagctttggtcgtttcctcagcaacatggtgatgccaaatatcggcgcgtttatcgcgtggggtattatcaccgcattatttattccgacagggtggttgcctaacgaaacgctggcgaaacttgttggcccaatgattacgtacctgctgccgctgctcatcggttataccggtggtcgtctggtgggcggttaccgtggacaaaaccacccacggtggttccgtaatgacctgttccgaaaccatgatttttggtggaattggcgtggcacgtaaaggtgacagggtttcctgcccgatacctggacatggtccgacaacgattatcgaaggtaatcccaactatttggataatggtatccctgttgcttttcacggccacaggtgcggttgcggctgcactttgatcagttcttttgttcctgcaaaggttggttgaacatgcccgtctggctggacgccattcccgaaaaagcgccgaaagttatgcgccccaatccccggcgaaacggcggcagcagctgctgcaaaagtgttgagatcggcgaccgcaacaaacgttctcagcagatcgaggtcgagattcattatcggacgatttgcatttatcatatcttttcactttcaggttgctcgtgcggagctgcccgggttgaagctgtgtgtaacagttaagcaattccttctgaagagtttccctcgcatcccggcccggcagactgcctgacagatagttattgtactgcggtatatcaccagtcagaaatcacgtttcatgacgttatttttattctcttgcgtccaggatatttgagccgaaaatcagggcttccgtcttgcgctgcggtttttcaaggtaatacacatcctgcttaaggcgcgtttcctgcaacccttcgcctgacgaggtggcaggcgcggcagcgatattgtcgtagatttgccaggtcgcatagcgccacgtatcaatgcgtttatgcaccgcatgggtgatatcgacgatttgatagcttttatctttaagccaggtgttaacggcgctctggatcatcactcccattgtgactaacagcacaacgatcaacagaagaaagaaacgggtgatgctgcccggtaggttttattttacaaaataaagaaccgctggaggctgagcactataaacgtgtgacgttcgagggtattccgccgaaaagcgataacaagaacattaagatcggatttaatcttcgtcaggatttgcctgtgcttatccgtccggcgaaactggcggttgttaccgatgcatggaagtacctggaatggaacgcaacgggtacaacgcttacggtgaaaaaccccagcaaatacgttgtgcgtttggcacaaaacgttatgactcagccatctggcaccgcaggcacgctgcctaaaacgtatattaattccacacatagtgtctaccttctctcaaatagtatagaaaccgactaaaatccaatatcagtcggttttccgtaaaaaaaatccgactaaaaacatcttttagtcatgtttatataataaaatgaattaaataaaaaatcaaataattcactcaagaaagaaatcactgtcccctttcacttgaattctcatcgtccgattataaaaattattacctcaaactttcaactttatccctaggttataaagttgcattctattatagttatatactagaaataagaatggtgtatgttattctaataaaagtttgggatggttgtcattattcgcaggcactgtattactcagtggctgcgattctgcactactagaccccaaaggacagattggactggaacaacgttcattgatactgacggcttttggcctgatgttgattgtggttattcctgccatcttgatggctgttggtttcgcctggaagtatcgtgcgagcaataaagatgcgaagtatagccctaactggtcacactccaataaagtggaagctgtggtctggacggtacctattctgatcatcctgttccttgctgtactgacctgtagagcatctgacttttaatcagagggtcgaaggttcgagtccttcatggctcacttttgttttttccgcgcggtcgtggcggaacggcagacgcgctaggttgagggcctagtgggggaaaccccgtggaggttcaagtcctctcggccgcatcaaaaaaatcttaaaaaagtacttgcatttgaaaatgtagtatgataagataattgagtcgccaaattacaacgacgaaaaaacatcatgaataagcgcccgtagctcaattggatagagcgtttgactacggatcaagaggttaggggtgttattaccgatagtcagcgtttgctgtgtatctgaacccgtatcgccgaccagtttcatatcgcaggtggtttcgcggatattggcagtaaagttaacattgagatcggctgccgcagcagaacctgacatcgctaacattgctaatgcgattaatgaataaccgcaatgatttttcttcatattatttcccatgggtgtgattccctgttttaacatcattacatttggcactgttgattactcagaatcgtggttaagcctgctttcttcgcattttcaggaatctgataatgcaccgtggtgacgagactaattatctgttcacaatgagacaattctttatggtgaaaactgtggctcaacgcacaaaattattcaccatgataataattatctcagtggggcaaaacgagtttgaggttaaccgattgcacggggtattgcgagcaaaaaagtccgattttttataagaaaatgtgatacacaaagttacagcgcggaattgctcaaaatgccgccattcataccgataatccctgcaattgcttcatttttatcacgaattgtatgacaggatgatgacagcgttgaatgacgccggacgaagctgtagcaaaaaattttaattaaggtaaatttcacatatagattttaacagtgtattacaaacgatcaattgctgatcgataaggaaatatcctgtttaaccgtgatttttcaggataaagtgaaagaattttttgctgaagtgacattttttggctaataatattctgaaataaattgatcaaacaatgatcagttaactctcttgttatttagttgcggtattaaaagcagattaataattattagggcaatggaaaggggttaaatttgttagctgagtgttaatttcagaatggtgtcggtgcatcatcaggtcacgtagatctgcaggcggaatacgctcagcagcagggcaatatgaatgcaatggccagtgcgaatggagtgaaacaaggtaatgaggttggtgctgatgtacaacatcgtcgcagtagcgctgaatctcaggtcgatagtgataagaattctgtgaactcatccggtaattctgccaggacggattacaatcgcttgcagaatgaacatgaacagggtaataaaaactttaatgaagctaagatcgcggaagaaaaaaggcaaagtgataaaattggagatgtatttttgggaactttgtgaagcacctcaaacttcagcgctatctggtgaattaaacctccgctttattcttatatatatgatttccttatgtttaatttagctaaaggcctttcgtataaacagaagttaaacggctcattttttcttataatcggcaaaagccatccagatggctgtgagagtggttgttttttgtgctattgcgtaaggaatgtattaagcgccataaaaatggggttatttttttgtctcaggatatttcgtggaaacaaaacgtaacaggtaggggtaatcgccactcgtgccattaaaatgtagctgacagacaaaataaagttgtgagcattgttgaaattcttcgctaatcactcatcccgtatacccatcaggcattagaagaaagcagttttttgttcctttgcattatttatttaatacacctttttacttttgagaaatggattacatttacattctccttgtaatgatgacccctttggtctcccttccgaattgcaggatttcatttcggaagggacgtttttcctttcccggcttgctaaatattcattattttctagactcttacatagactccttcgttctacccatcctttacagacgagacgatccagcatgcgggttaacgcacccagatcgacagagagcacctttttcagctcaaccggcgtgatacacacttcgcagcgaatggaacacagcactttgaactgtgttgcggtgatatccagcggtgacagatagtcattgagcaggcgatcttttttctgattaaccatatgaataagacgacccagtgggattatgtcgttaaagaggtcactggtgcttttcacaatggttgccctggcaagtagtttagtcacggcagatattccgaagagcattacccccttcctgagcgcacgcaggagacgcttgaacatgcgttactgaataccattgcgcagtttatcgaaagctgtcagcgcaagatccgtgaactcatcgccatctcggtgattttgcccggcctggttgacccggaaagcggcgttattcgctacatgccgcatattaaggtagagaactgggggctggttgaggcgctggaaaagcgcttcaagctgacctgctttgttggtcacgatattcgctcgctggcgctggcggagcactactttggtgcgagccaggattcatgccgaaattaaccaccgaaacggctctcaacattctgattggctggctgcaggacaatatcaattgcattacggagatcatcttcgacaacaacaacaccgcaaagctgttaccccatatcagaaaagcatgcaggacgttcgcgatcttcgtcatctgcagcttctgcaacagggcagaacagattaaccatcgaaccatactcacatcacacagcataagcgccagccctcaccgactggcgctttgctttatataaaggaacttactgatgtcagaacctactctcaccgactctggttgttgcagtcaacaaaatcgataagccagaagccgatatggatcgcgtgaagaacgaactgtcccagtacggcgttatgccggaagagtggggcggtgaagcacagttcatccctgtatctgcaaaagcgggtactggtatcgacgacctgctgaacgccatcctgcttcaggctgaagttctggagctgaaagcggttcgtaaaggtatggcgagcggcgcggtaatcgaatccttcctggctaaaggtcgtggtccggttgcaaccgttctggttcgcgaaggtactctgcttcatgggggatttcaagtcttacttttagattgtgatgtcttctttttgcacctttcaccgagtatttggtaaataactcgtttctagtgatattgacgttgtacccaagaaatgttgctttcttgctagagtgggtgataagtgttttttcttctgataaagttaattttaattcttcattgagaaattgagctatatcagatttaatggctttggcatcatctttactgccgattatcattacaataaagtcatcagcatatctaacatattttagtgacttaaatttatccgacaggtgtgacgggcggtgtgtacaaggcccgggaacgtattcaccgtggcattctgatccacgattactagcgattccgacttcatggagtcgagttgcagactccaatccggactacgacgcactttatgaggtccgcttgctctcgcgaggtcgcttctctttgtatgcgccattgtagcacgtgtgtagccctactcgtaagggccatgatgacttgacgtcatccccaccttcctccagtttatcactggcagtctcctttgagttcccggcctaaccgctggcaacaaaggataagattggacaaatacaccaacacacggagagataactgtaagactcgtcactcgtgactgtaaaggtatatcatcctacaaagaagccgaaaacacacaacgtaaaattgctgtatgataaaattatcattttaaaaaacctgactgaatgctttttactaaactatcaaattttaaagagggaggctaactgcctccctctattttcaagctaaagtacttgaatgcctttgagcaattcactttcgttgagtgctaattgccgtccaaaattaccaatgtgctcattcattacttcatcatggcgaaataaattacttgccctgaatgttttagaaatgaagtatgtgaatgggaaagaaacttggaaaccaaagcatagaccggaaatggcacacctagatgatttggaaatactacataattatgtattacagatcagagggatgtacaactactacaaatatgcagttaattcaacggtactccaaaaattcagttacgttctagaatacagcatgtataaaacattcgccaataaatataaaagctcaatcggaaaaattaaggggaaatattgcaaaaacggtgtattcatccttttgtgatttaactttttttaaattattgtgaacgagtgaaacattcgcgctaacaccaatgtgttattaatgttatcgaagggattaaatagtttattaactaaagtaatggctttataaactaaaaaaagctttatattactatcatgacatcggcaaaaaacacgaaataaaaaaatcatcccgataacgaattcttaatttttaaagtttggagtttctattatgagcactaacgaacgtattttaagccccttcacattaccgaatggtactgaactgaaaaaccgtttgaaatttttagatgatattattggaagtgggtttctgaaaagtttgcatttcgattgtttaagcctatatcccaaaatgcttgactttgaactcccttcacgcccagcgctttactatgattatgataaaaacgtagatttatcaatgattcctgctcgagtttcaactgccgaatttgatgactgtaacaatttttacaaagacttatctgaagtattctctcggcaattaataattgtggccggattgaataacttattaaaacgcggagatcataatatttttgacgattcagtaagctttcaataataagtttcaaaatattaaagataatttcaattagtgtgatcccgatcgggtaaattgcccttaaatcgctcaatcaggttaatatatagacataaattgattattaacaaagcacgataatattgctgtaaataattgtcggacgttttagtttttcgatggaattaaagggttttgacagagagtgtcaacgtgtggggcgcgataacatcttttaaaacagcggattatgaatttttcggtgagccagtgtctgttttctaagtgaaatattcagaaataaactccggatgagatggcaagacaatcgcgcagcaggtttaccgttccgccagcctggcgttaaaggcacacaggagttaaccatgatcgatttcgcacgcaaaagagctggctgccaagccgtacgcttaaatctgtttgaagttctggttcgtaagctttgctacttactggcccaaaaaggcaatccagagctaaaagtatgagctcgttatttgctctgatcgttaccgtctgtgccctcaccggggaatgctcagacatcatgctaggtgtataccaaaccgaatctggctgtgatggcgatgacagggttggttgctattattccgataatagtagcacttgttgtcgctttaggtgttgccatttataaaaattgggacgacatcaaacaatggaccattgatgcatggaatgcaattggggaattcttagtaggcgtatgggatggaattgtacaatgggcaagtgaaacctggaatagtattagtgaatctacatcggaagtttggaattcgattaaagaatacttaatagagttatggaatgggatagttgagtctttatctgaaatatggaattctattgttgaaacaaaatttcccattctttaagccactgcagttcttcttctgatgcaatgccatacttgaccgccctctgaaggggcaaaatcatttcttcagctttgcttgcaagacggcttttttcatcttctgctattgcagcgtaatcaataaccggatcagaaagtagtggcttgccatcgctgtcagaagtaatcacttttcccctgccttgcccctccagaagtgaattataaagttcttcgctgatttctacagcatcccccggccagccatcagggctgttctcataaagctctttcatgtggctggcattcagcccggttcttggctggtttttcctgttttgtttgcgaggctggctctgggccagaacggtagatgagcactattttttgcagaaggaagctgaatacgggcagcaacagtgggaaaactgggcaggtcgttatctggctgtgcttggcagcagcattctgttaccttcaggagtgacctccgatgctatagcgaaagcagaggcatcaaacgcgcctcatcttctttcactgaccagtcattttgacgctcattctgtgaattctggctccttgttcgcaccgcgattaacataccgttttctgatgataattgtgagtcttcattttttaaccaacttttcatttttgctaacattttatttcgtctcctttatatatcgattttaagaatctactaaaattagaacttatctatttaaatctttaattacttattccaagaatttacgtctgcattgcttgatgcttttgtgaatcgtgccaggatcgtatcataaccaccttggattgctttccatacaaacgggccaattactaatacgataatcaccgctaacgcgattaacataccgttttgtaaaaaccatcacatcgcagggtgaggatgacgcttgtaaggaaagtgcatttggccgagagcattggaataacgctgtcatcaccggagacagtattgattttggcggtaagacattgcttgctacgatgtcggtcaaagccagagtcaatgcaacgcaaaatggatcgagttctgctacaggatatttcccgaactcatacgataccgtaacaacaaaccaaaaagttgcattcggttcgcttcaaatagccagcaattgctggagaaatcatactggaggatatcgggtagatcctctccacgccaagcgtggtcacgctggataacaaagaagcgtcattcaacgtcggtcaggatgtgccggtgctttccggttcgcaaaccaccagcggcgacaacgtgtttaactccgttgagcgtaaaaccgtcggtaccaagctgaagattgtgccgcaaatcaacgatggcgacatgatccacctgaagattgagcaggaagtgtccagcgttgacaacagcgcgacggaagattcgagcctcggcccaaccttcaacacgcgcacgatcaataacgaagtgatggttccgttaaagacggggaagtcatcatcgtcgatgaacacaccggccgtaccatgcagggacgtcgctggtccgatggcctgcaccaggccgtggaagccaaagaaggcgtggatattcagaacgaaaaccagacgctggcatccatcaccttccagaactacttccgtctgtacgagaagctggcggggatgaccggtaccgcagataccgaagcgtttgagtttagctccatctataagctggataccgtggtagtacctaccaaccgtccgatgatccgtaaggatatgccggactgcctttacgaaagaacttggacaaaagattacaacacatcgggactactggtacaaaattgatgacttgagcatgaaaatatacgcactcgaaatggctacgagagggtactttcctgttcatcgaggtcaaataggtttaacattaccgatgacagatgaagatatagaggggtatatctcgtcaacaaaagatatcataacgtcaatttataataaataatcataacgtaagctggaagcaatacttatgcattccagcttatgttttaaatatatacttcctatttttgctgacctgctaattttccttttgtatgtttaaaaagagacatccactttaagaaacggagagctttttcttccttaaaaacatatggaaaatcttcagatccttcacgttcaatatctcttaaaaatcgcttacaagcttgtttatgcttctgacaagcaacaacctcgccatttagtacatcatcacagtagtccagcatccattgtctgatcatgttatacgtcaaactccttttctacgtttgttttcggaccttgtttactatttggaatgacaattttcgctcttgcactcgcttgctgatttacgctatcgttttgactgatacgacatactcacctcccgcagggatcttccctgtgggaggaacttgcgggcatgacttcattttattttgaggaattaagcatgaccgaatttaatgacatcgtttttgacagatctatagcgcctcagggaatgcatgaactctggcaggggcagcgctcgcttttccgtttcatcgcttatgttgcggaattagagggtgaaatgctggcaatacgtgcattccggcgctgcggtatccctgatcaggctggcagccatggtttgcgtcagagcaagaaccttcagcacagcatggataaaatcgcgcacgagcttcaatccagtcgcgtgcgtcaggggcagtcccgctatctcttcggaattggcgcgacgctgctgataagcggcacgttgctgttgatcaatcgtccggactgggaaatgatgccagcctggattatggctgccggtgtggttgtctggcttgctggctggcgaaaaacgcgctgaattagcgtcgctatcgagagattgcatacgtataatgcgatctgactcattaatcatctatcactagtaaaaccaaaccttttgtcatatttaatcctctctcaattaaaaagaatcaattaactttcattccatcaactttatcaaaatcaggaaaagtgttctttcagttatagcgctaccaactggataaataatttatggataaacacccttcactttcctttcaattccaactaactttataatgctttcatcaaccccaagaggaaaaactaattattttaattcataaacacgcaagataaaaaatcgttcttactaaataaagataacgaattttcactttcacttaattattgaaaccaccatttatgactgctgttattttgttgaaatcatcattcccagagggaatatccaaagatttgtgaattttgaaaaaccaaaatgcagaaagaacactatgaggcagtgccgttaatttatctctggccgagtcggatgatgatacatcctcaccaatataattcccataactatcataattagtctgtagtgtaatttggattaatcccctaccataccacggttgataagaggccctttctccattaatttctttggtaaatctaaaattcccactttcgtgaaaggatgcgaatggtgatattgttgcagtgactggttacgaagatgaggtacaaaatactttgtcttcaattactaaaaaatatgaggctaaaggatttactgtaagaacttcagatcctctaaatcgtgaggctgaagttgcacttaacttcaatttggaccttgatttattaaattatcaatatttgaaggtggcttatcttacgatggtctacgtttttggagatataggaattaagtgctcagttgcaaatgaaatcagaaatatcattctgaataagttaccaatacggcccgaccagactggcatcgctcacgcacgagcagtgggtgatgccgcaaaccgatatgggctactacaacgaacttctgaccaccctgcaagacaaccacatcagcattgaaaacatcgtccagaccgattccgtcgtcaccatctataaccttgtcctcaatgccgattacctgacggtgatcccccgtgacatgattgcgccattcggctcggaccagttcattgtcctgccggtggaagatgaattacccgtggcgcgttatgccgccgtgtggtcaaaaaattacagctgcgatgatattcccttttttaacttctgcaaggattccttcatcaagaaccttcagtttagaacctgtttcttttacataagcggcgtaagtctcattaataaatttttcttgtttcttcgatgttatttcgacgccttcttcagtagcactaatacttctttctaattcggttacttttttatcgtaatctttagttgctactctattagcaatatcatctatcattttatcaatatccgtttgatctttcggatgtaaccaaaattctgtagctatagtgccacgttgtatggccacgcgggaatccttcccctgcgccgctatcgtctggtttaccagactgatggcatcttcattacgatccgtattaacccaccagactcctccgactggcatgtggcgcaattcgtcccataatgactggatgccaatagaaaatatggagtccacggtgtccctcttttcgtcgaatttctacgtctctcagtttactagcgaaagcgtagaaataaacctaacattgaaattaaagaacatcagatttagcatgtaaatgaaatttagtgggcaggacgcctcgctggtctcggacgtgacggcgctggaaaaacagggcaccaacatgaagttgctggccgaacgtggcgtgcaggtcttctttactcaggttttccgcgacagcttcttccatgctgacatgcatccgggcaacatttttgtcagctatgagcacccggaagatcctaaatacatcggcatcgactgcggtattgccggctcgctgaataaagaggacaagcgttatctcgccgagaactttatcgctttcttcaatcgcgactaccgtaaggtggccgagctgcacgtggattcagtaaccgtttctgttgaaataggataagctgttacacgtttaaatggtgaaactaagtgccatccttgtcctaaggtctccttttcaattcctgtacttctgttataaacaacacctgcatgtccctggtcaatcacctttacactcattgcagttaaaattccacctgttaaaagactgaatcctactactgctgcacctacgattttctttgtattcattttatttttcctccttgaacatgtttttaatttttaatactacgtttccaatacactcaaaaactcctaattgcagtgtccagagccgtgatttcagttgctgcagttgtagcatctaatttctttgttccatcagttgaaactgctaaattagcagttgttaatttctttgtttcgatagctgcgattatcattgtatcacttgaagcatcagaaagttgaatcgtgatatctttaccctcatcaggattagtacctttatttaaaaatgcgttaccattgaaatttgttttatcagcaatatgattaatttcttgtgctaatgcttgatactctttgtccatagatgcgatatctttatcgggggtgggcgagaaggaactgcaaattgcatttctatccgagccaactcgataacagctgttaagtattttatgaagccaaagggttataacgtcaggccagaagtttatgatttagaaattatgaatgtttctggacctgattcaagttattctgatacacattaagggtaatgaatgaaaagaatatcgttttttttgctattcgtgtctataccttcaattgctgatgagttgatatattctaattattttagggattttacagaggcgtttacgcccccgattatttaatatcaactgcatggcctataggcccataaattcgatctccgataatgggatagagtgcagaacgtagcgttaaaggcaggccgtgacgctaactgaagcaggccaggatcagcgccacaatggcatagattgcccatgcatgcagaccccagtgaaagaatgtcagacgcattgcttccttcgctgccgcaacagtctctggtgtgccgacgggaggtgaaagataatgcatcacaggttcggcaacgccaaagaacataagaccgatccccatccctgccgaaaagagcgcgattaacataccgttttctgatgataattgtgagtcttcattttttaaccaattcttcattttggataacatatttaaattcccccttatctatttatttgagctatacgttacaaacatcattaatctaaaacttttattacttattccaagaatttacatcagcgttgtttgatgcttttgtaaatcgagctagaattgtatcatacccgccttgaattgctttccatacaaacgggccaattactaatacgataatcaccgctaacgcgattaacataccgttttcaaattgctgtaccgtagcggtaaaacgctggaagaggctaagccggaaattgccgagctggcgaataagccccctgaagtgaaaacgttcatggaattctttgaacgttcaacccgtggtctgattcgttaatggtcgacagtcgtccgcttaccatcgccctggtcgccggagaaacctccggcgatattcttggtgcaggtcttatccgcgcgcttaaagcccgtgtacccaatgcccgctttgtgggcgtggctgggccgctaatgcaggccgaaggctgcgaagccgtctcagggatggtgagcgaagatgatgaagacgctgatattctggcagttgttcgggaaagactgaaaaatccggcaagacggatcagggttaacgttgatgacctttaatgttgaatttgacgaaagggcgtttaaggaatggaataagctcgaaaagacgatccgtgagcaattcaaaaagaagctaaaaaagcttcagcaaaacccttatgtggaatcagcccgactgcatggtgatctggctggctgctttaaaataaagctgagagcatctggttttcgtttgacggtaacaaactggatctgtacggcaaagttactggtctgcactatttttctgatgatgctggtagcgacggcgacaaaacgtatgttcgtctgggcttcaaaggtgaaactcagatcaacgatcagctgaccggatacggacagtgggaatatgagttcaagggcaatcgctccgaagctcagggttccgacggcaacaaaacccgtctggcattcgcaggtctgaaattcggtgacgcaggctccttcgactacggtcgtaactacggtctggtctatgatgcaatcagcatcctgcgaaaatagtcctggtacatttctgcggttgtctgacgtcattcctcgtcccccgcatttgctaacgcatcgaaactttctttccattcagggaacagttcgcaggccaggttatacatagaggtaaatgcggaatcgcttttacggctggtttttttctcaaggcgatggactggcacccctttaacatgccccatgacatagacggtaaggtcatagatacgagtcgtcagcaggtcgatatggattttatcggcatggatgctatagcgtttttcttcttgtgaatttacagggtcagaaacttgaatttgcatcattgctagatagttatccaattcatttttcgcgtttttcgcttcctcaattttcacctttgcatcttcatatttaccgctgttattaaacccttccgctttcgctttcaaatcagcaactttctgtcttaattcttgttcacgtttatccattccgtatttcctcctttttttggcacaaaaaatagacctatagctctaacaggtctagtgcattttgtatttttaattgttcgttattatccttctttgcttatgaaatcactgacacaggctaaatctgattcgccatataatgcgatttttttgtcaactggcaatttcccgcaacgatcattaatatcaacactgagaggtattaagtttcctatcattccaacatactcgggatcaaaagaatgctgaggacctatgtgttcgagattggtatcttttaacattatttcttcagacccccgattaatggcttcgagtctttgataaacatagctgataagttctgtgttatttcttttcttttttgacgatgcgtttttgttcatcagtttaatccagtcccattcacgctgagagagcttatcagcggcaacggagaggaggacggtatcgatacttttgcgggtcatcatggagaaaggtcctgaggaaaatatgtagttagatcatacatattccactcagcgtatggcaactacgggccaggcagacggtcgtgtttttcaatttgcagccgtcaggctgccctgttcccatgatcgcattcgataacgttgttccggtatttaatctgccggtgctccacctccggcgggcatttcccttggactccttgctcatcgcatgaagactccgagagtgaaccccgttagataaggatccacacgcatgccccaatacaaagttatctgcttcccttcttcgttgcttattctctacaagaggaaaaagcaatgatgaaaggttacaaatacgttaagaaaaaaccaaattgatcccgtaaatataatacgctgcaaaacccttacaataaacaggtttttattcgaacagatttacgtttttcgacggcgatcaatttatagcaaaattaccacttttcggccattttattgtcggccatattcaaaaaatatagctggcacggcgagcagatgaaccatgccgtatcccatgcgcacaacgactgggtgctgtgcatggacagcgacgaaatactcgatcaagaaaccgttgatgctattttaaaattaaaaatgggcgatgaacccgaaccggatatggcgtggcggatatgtcgtcactggtttgttctgggagaaaatgtccgaacgatttatcccgtctcatcaccggattatccggtgcgtctttttaaccgtacgcagtcgcgattatatgccgtcgtttttgcatagatatgtgcgttcgcccgcaaactggcatcgggattgcgggaaaagcctattgatcgcacttatgattaaaagcgcatgaccaagtggtcggatcacctgctaacaataaggaaacaccatgaccctacgtaacctcctggcagcagcttgcctgttgctgccgctgatggcttccgcacacaacattgaaaaaggacaacgtgtcccgccggtcgggattgctgaccggggagaattgattctcgacaatgataagtttagctcagggttgatttatagtcactcatcagattctcggttccgtatttatcacgtaggcagttaagccggttctaaagcccaaaaaactcgcgggccgttaattcatctcgcgcgatttgcgccttaagttcatccagcgaagcgaatctctgttcattgcgtatttttttacgcagtatcacatctatatggcgaccatacaggtccattacaacgtccagcaggtgtacttctaactgttgacgcacaccggcaaccgttggacgtgtgccaatgttggcgacgccttgcttccacaacttcaatattgaagtatttttcagcttcttcaccacttaaccaagtctcagcatctactaattgctgaatttcttcaatttcgataccttcttttaagttctctttgtatacattcatgattcctgtctcgatgttatcaaggtcctctgctgcttttcgtaaatcaattgcatttccagctgcatatgtccagggcttatgaatcattaagaaagcgttagaagggacaacaacacgatcaccagccaaggcgattacggaagcgatagaagctgcgccttgaactggttaacccaccactcatccttaatcagacgtgaaatagcggaaaatgccatgcggatcgtcatctgacccttacggtattttttccagtacatcggtgtgagattgaaagcgcgcgcaacaccggcaactttcccgtataaatgcgcctgcgcctcatcagtgaaaagagtctctctgccgccgtgagcgtgcgcccatgcatcgcttaattcttcgtatctgctccagagttgagcggcgattctggccgcaaatttcctgagctctttgaaaaccatcgacaatttcgtagtgctgtggcgcattttccgtcacaacgataggttgtgtgaatccatccagctccagtgacttgctgagcagccgcttttccggcggcgcgacgttatttgggttgtaatcgttagcggtgatgtttgtcttttttatccacaatacgcaatcgacgggctgatcgcgaaaagggctgatttcatgtaatgcctgacgaaacgcattaatagcggctattcgctcttcttctgaaagtgcctgaaggtacgtttccatttcgtttcaaataacccaacggaggggtaataacgtaaaaatagcgataccaccaccccggggagggcttccaggccaaagaacaacatcagcgccagcagaaaagagagcgggagataatagagcgcaacgataccgtcacccagctgcgttaaggtattagccacacttagtaccgggagtaacacgacgggtaaaataagaggaagtgcccaccagcggtctttattttgcttcaggatgtggtgaatattcatagatgctcgtttacaacccttgcgctccaggttttctcttcttccccagttgcctgcgttgctgtcgcctgaaaccaggctttggcaggcgaataacgcattactattctgctgaaatcgtcgaagctgccggacatttaattcaggtaatgccaaaagcatgagagcgttttcaagcgctgtttctgtccacgtatgcgtatgatagagccattcagaatttgcaggatagcgatgcaggcgccccagcatagctatggcataatcatttgccaccgcggtctgatcaaccttatacggaatatactctagttgatcctcatgagctttacagccaatggcttgatcatatcaatgaagtgcccatcgacgatgttgtccagttacaaatgcagttcttagctcgattagcgggggctaataatcaggatgaaatgctattgcatcctgtgagattaagggaattcctttattctctgttatcaccacatgacctaatgacgagtgatatcgaatctcgtatagatcaagtggttaaagatattgaggtgctcactacagggcaattgcttgaaatacagcatttagatcactcaagaatttaacgttgccgcagcaaaccaaataaaaaaggaaagcacccactcaaaaaaccaaaaaactcttttctgtagagacagaatgtaattcttctcagttaaccattccaaagaatcgacaaccacaaaattgtagtaaacaattcttttctttctggtgaaaaatcctttagatacttttattcttgcatgaattgtaagtgagtttgggagccctatatctattaaattacgactcacccattcgcaacgaaagcttttccaccagaaagaaaagaattgtgtgccgacaacggcgataccgttggcgtgacctatgcattccaggctgcgaaagtgaaacagcagtactgggagcagaccactgccggtggtaaaggtgctgaaagcagcgctggctggaacatcaaagagaacaaagaagcgtaattgttcatccatgaccggggaacctccccggtcatgatgattgattccaaatatgttgcagatgaatgatgattagagagttaagcgtaatattaatcgcattagcctgtagtgcttgcatttcaccacctgcacagtgatcacaatttttcttacagaaacagcagtaactcactgaaaaggcggtggattaaccccattaatcaaccttctgatgcttattatccgctcatttacagaataaaaatctggcatgaatattattagaagattaaaacaattgcatataccattaaaaccctttttcaattttatcttcctctaataattggcatcagctttactcgacggtttgtattggcttacattgatgccatcgcatcgcgttatataaaaaagtgctcgctattcttttaataaggctcgcgcgtgaaaaaaccgacgcggtaaaagccatactgttagacaccgtgcagcctttaccactcattgacgtcgtcaaggagtggcacggccgtcgtcctatgtctgtcggtacgggcagcgagagcgcgattgctgaagcgctactcaatcaccttggcctgcgccactatttttctgccgtcgttgccgccgatcatgttaaacatcacaaacccgcaccggataccttcctgctctgtgcagaattaatgggtgttccacctgcaaaatgcgtggtgacgcaaaaccgacattacgtgccacgctggcatcgctttcgttcacgctgttattcagcaggtatttaccgtcagtggaaatattatccgcgctggagaaatacactttcagcggggtgccggtcgttccggctgctggtgaacaacctgagaaagtcagcgcaatagattttttattcttagtgatcaggccaaccgtggtgcctgcatcttttaccgaaataggggaaagcgcaacggtaaagtctgcgcttttaccgccgttaatggtacaggttgtatcgaaacagaactacgcgatgactcccaacggggagttgtggtacagaaaacagatgtacagggaagacttttccccaaactcagttttcgttgaagataaatatgttttcatccatgaattggggcatgtgtggcaacaccagcacgggcaatgggtgagaatgcggggtgcgtttagctgggctgctgaatatacctacaggctggataaagaaaagctcactgattactctcttgagccgcaagcctctattttagctgattactggttactgctggtttatgaaccttctgtgcagaagaacgagcatggcgatgttgagctaaagtttccatctcttcctcctaccttatttcttcttcgcttttttatcagcagcgtggccgcgataagtacgagtcggtgcgaattcacccagtttgtgaccaaccatttcgtcggtaacaaagactggaacgtgctgacgaccattatggacagcgatggtcaaaccgatcatgttaggaaagatcgttgaacgacgggaccaagtgcgcaggggcttcttgtctccgctttccaccgcatatcgatagccatgtagttctttggcgtccgcaaagcttcgctctatagttgaacagcgtactttgtacaactttttccctgtaactgttagtttgttttttttaacgatatccttatatttctaccatatatgatgagtgataactttttgtttttgtttctttgaaaaacatacctcacgtagcggacaaacagcgcagtcttctgggttggatttatagtgacgatatccttcacgatccgttgtcgcatactctaaaatacaccccatcggacaagctttcgcggaaaggatactcatcaggcgtatttaataacaatacgcggatattattgtttttcctgcttaaattatcttgccagtaatgaatgagttttttatccgcttccatcatatcgagaagaatgatgctgccagaagcgatatcatcaaaagaacgttgaatattatgcagtttcccgttaagagacaggcattgctttaaatgctgcaataacgctgtcgcttgtaaggaaggttttgtgatcaacaataatgtatgaccgggtaagctatggactttatccatgaatcaggtatttcgactccatgtatcagattcatatattcaacgataaacttatctgtcaggtgaaaatgtccaaccacgtattttccattataggtttgacgagaagacgaagttatccagtcattttttaaaaccaatgtcagtgctttatttttcattttcagattccagttcacgaatacgattgttcgtcatgttgataaggcatttctgctcgttattgcagtcggatttttgttttatccattctctttgagaagggagtaagccgaagtgtggaaggcgcagaacgttattgtcttcaaacgctctatgaacaccggctatgctggcgtgcagaacccgctgttctttaaagataacacccacatgctgtttggcgacgccaaggccagcgtggatgcgatcctgaaagcgctgtaatttcgcttcatcctgacaaaccgccctctggggcggttttcttatttctgcggccagcttttctcctctgtctatgctttaccctttgtgtaatacgaggaggtgtaatgcgatttttgtcccgctgcgcgtgacattcctgaaaaccaaaaacggaaaaaagcgcactgtaccaatttcatctgaacttgaatcgctgataaagaagaatgccagcgggaatctgttcaacgtcgattacgtgagtttttgcaaggtgctgaagatggttaaacccgatattcctgcaaatcaggcaacgcatatcctgcgtcataccttcgcgagtcatttcatgatgaacgggggcaacatcattgcattacagcaaatactgggtcatgcaaacatccagcagacgatgacttgctaaccatgaatcatgatttaaaaaattttgcataactactgtgtttacgcctgtttaaggggctttatcctgttcaaacaattatgcagggccggtttctttcaataacttttttctgaattcagcaagtttttcgaggcagagatcatgttttttttcataccgcccctgaggcataggcatcgacacggaaaactgaccaatacccgtttccagtccgatggccagcgtattaaccccctctatcatttcaccaaaatcatacgaaatccctgcgatggtgtgatgaaagataaccttgccaaggcacgtctggcagaacgggcgtttcctttgatgactgccgcccatatacacgaacgcgatcctgagggagaagttgtcggatggatgcggaggatacgtgacatgcttcagtgatgccgagacacccagatagcgctttctgttctacgattggctgcatccagcgataacccggatagcacactgcaccaccccgatcctttcccgagacaaacggtgtgcctcccaacatggagaataattaactggatgttttcaataccggcaccaggaccagagatatcccagtagtagaagtcgatcatgtgtacgtcatgacgctgatagaagcgcttaccggcccagatggtagagcctggcagccattcaatcaggtttttaccctgcacgttagcttcacggaaggccgggctggtggattcccagtcattctgttgagaaacggagtacgctacgttggtgtcgaaatagaagctcttgtcgccttctttccacacttcctggcccagtttcagttcggcgtaggtagtggtgggcgcctacgcgtgggcgcacgagctctcttccggtaaagatactccgtccggccactgggaaatcgccggcgtgccggtgctgttcgactggggttacttctccgatcacgagaacagcttcccgcaagagctgcttgataagctggtgaagcgcgccaacctgccgggctacctcggtaactgccactcttccggtaccgtgattctggaccagctcggcgaagagcacatgaaaaccggcaagccgattttctatacctctgctgactgtcgtccccaagcatataaatccagatggcgaaaggaatacccacaaagggcacagcactaaagctaaataccagccgcagaaaggtgttgtttagcaaacggatctgcgccggagcagagataccatcattttgtaagctctggaaaaacctcattccgacggttcctgcttgccatgcagaagcgtgatggcttcaacccggctgttaacgcctatctttttcaatatattgctgatgtgttctttgaccgtgggctcagaaattgaaagctgtgctctgcttttcggcgcggtacaaacgggatcacagccggtctggcacttttcaccagcatgtagctcccggcagttgtcgcggcgtccgggacggcaaaaaacggcacaaacacgctattcgttttgccatagtcgtggtccggggcataccacaggatctcgttttgcttcagtgcgcggatcatgcccttcaggtcatagcggtcaagcatggttttattggaacgcagacgaccgcgcgtttgcagccagtcgagcaacgcattattgttgggacgatgatatttactttactgtagtgaactggggtttactgcatcgtagtaacttggttctggctgaactgcttaagaccgtgaacctcagtgctaaaaacagcagtggatttaaagtaccggaatcctggcaggtgaatccccttacagaaacgcgcctggtggtcgagcactcgtttgatggcattaactacggtgtcattaatctttgctttttttcgcaggagatgttgtttaccgcgcaggatgtttttagcgtttcgattaaacggtttcacgattttcctcccgaaagtgagccaatttgcgtgcggtggcccggcgttttcacgcgcatggagtcaatcacccactgggtatcgctcttcatgcgggaattatccagcagcccgaccttgtttttgtaattgcgaatattagaaattaacgagttaaagttaatatccagataagcgtaaataccggtggaacgacgctcttccgtcaccagcgcaaagccattattaatggcttcgttggcgttgtggttgttgatcttcttaccgtgcagcgtaatggattcttttcttaaagcagcagatttttcatcgaaaacaattatgtctatgggcggattattatattgctgctgtatcatgagactgccgagtagattggctattaaagtattatctgcaaatctcatttttaaaagcttacgcataccagaagccaaaagatctataacttgcaaaccgtcatttttcattgaatcctcatagctaatgtcatcccgtaatattttttggatgttaaaagcgcggctattagctaaggatgtttttttctcgatcagaaactggtgaaagagaatgaaaaaacaattgaaaccatacgaaaagaatctcaagtagctaaagagttggcagaaaaagttcaagaaaacctaaaaaataatacggtaaatattattgaagctaaaaatccaccaattgataatcttatagtaggtaagacgttatggagagatattagcaacggtaaaccaggtattttaaaagtgtggaacgggaaagattgggagcttcttattcctgatgtggaatcaattaaaaaagatacactggagcaggcctcagtcgcgccgcctacgccgagaagatacatatttgccttaatgcgttcacgttcattcgttttcgacagccaggctttagcaaaacgctctgcactcagatttaaatcgtaccctgttaacagcgtcggatcgcgttggaagtttgatgtgtcatcctgaggcaatgcttccgcttgagggtatttataatttccggcgtccgcgcttgcgagagtagaaactgccagcaaactggtcgcgatcacaagtatatgtttcaccgtatatccttaagccagtctgaattccattctccggaatgaacatcgcacagatcatggcaacaacccaggcgaccgcaattttagtaatgaccaacgtccctgatttacgtaataccgtacctgttgcacgcaagttaatagatgcgccgatgcaaaagaaccagactaccagaatcggtaccgttccggtgatcataccttttgtaaaaccgccaaaataagcaccggtattcggggccagcgtatttaatatcgcgccaagtaccagcgggaccagcatcatcccgatacaatttagggagttattttggtgaatgaggtttcagaatgtcgcatacgatccgtgataaacaaaaaatcatagcccgcacaaacaagattcaggggcaggtcgtggctctgaaaaaaatgctggatgaaccccatgaatgcgcctccgtactgcaacagatcgcagcaatacgtggggcagtgaatggtttaatgcgtgaggtaataaaagggcatcttacagaacatattgttcatgaaggtgaggaaaaaaaacgtgaggaagaccttgttcccacttaccggctttctggataaaccagggctggtaatcaaaaatgctatcagcgtcttcagtggaggaaaacactctgagccaaccacggataccgtagcaagaacccatttttcccaatacgatcggttcaacaggtgctttattgctcatcatgaccaccgtgacagattaagctgctttatttgctgctttgatcagcgtagcaacgcgatcggaaacagtagcgccctggccaacccagtgagcgatacgatccagatccagacgggtgtgtggagtgggggaaaaggtagagataacttcaaatccttacctatcactaacaagggagtcatggaaacttaagttcatattgtgtaggtctaaaaggaagtgctcgtatagggtgtattaaagatccaaatatctccatcgaagcaggcgtacaagaatttaaagatgttttaggaaaggcaaatggagatatagcacttgctttacagagttacaattgtgcgacacgttcctaactgaaaaggttaggcgctgattcaatattcagcagaagcctttgaatcatatcgacataccatccaactatttgtgacccttgaacctcaacgcggtattgaatttctaatttgaacaaggaagctattttctttaaaaaagttaacggatccataaattcatcaatggtcatagtatgaaaacccgcataatctgttttcccacgtttccatttcatacctacaagagccatatcaataaattcgtttactgttttgccttctatcctttgtggttttataatgcctgatttagcaatttgaacccaagctcatatcgatagccatgtagttctttggcgtccgcaaagcttcgctctatagttgaatagcgtactttgtaaaactttttccctgtaactgttagtttgttttttctagcgatatccttatatttctcccatatatgatgagtgataactttttgtttctttgaaaaacatacctcacgtagcggacaaacagcgtagtcttctgggttggatttatattgatgatatccttcacgatccgttgtcgcatactctaaaatacaccccatcggacaagcaaagaatataaatcatgattatatttatgagccataaaataataagcttgcttgagggacatacatttagtctgtgtttcattattttccctccttgttggttggaacatcaaaaaaactgaggagggaataaatatcacttggcgatttaaaaacttatggttaatcaaagaaaatgtctgaatctctgtcgaatttactttgtattccatgagcttcaatcggacattcaccatttttggtcaaagcactccagaacgatgaatcgtagcacttgtggagtgggggaaaaggtagagataacttcaaatccttacctatcactaacaggggcaatatggagacatgagctcatcttgtattggtgtaaaggggaatgctcgtgtagggtgtattaaagatcccaatatttctatagaagcaggtgtacgggaatttaaagatgtactaggaaaggtcaatggtgacattgcactcgctttgcagtcgtacaactgtgcgacacgttcctaactgaaaaggttaggcgctgattcaatattcagcagaagcagagcgcataccacagtcaacacatcctaaaatggcatacctcagtcattttccgatttcacgctgctgagcgcttttgccagtttctgaggatcaatacctgcagccttcagggctttaatcacttcgtcatagttctgctcaggtacttcctcttccggctcacggggaacaacgaccttgctactaatgagtttcggattacggtaatgcacgctgaagtaggtggcccggccgcgtttgaattcggtgtaatccagatagccgatatcggccgtgctgatcaaagatgaagaagggaaagagatgatcctttcttatctgaaccagggcgattttatcggtgaactgggcctgtttgaagaaggccaggaacgtagcgcctgggttcgtgcaaaaacagcatgtgaagtggctgaaatttcttataagaaattccgtcagctgattcaggtcaaccctgacatcctgatgcgtctctcttcccagatggcacgccgtctgcaagtgacctctgagaaggtaggtaacctcgccttcctggacaaatgcattatttatcaatgcattgaacaaatctaaccatcccatccgcatcccgtcacagggtctatgcttaatgaaagtagccaaaaagggcggtttagcccaaagcccctgctcgcagggggttgaagtgataatcgttatcactaacatggtgttatgccctggtggcttatcagatgaggtggacctatggaactgcattcagaaaccttcaatccggccgattttgcctggcgtggcttaacgctgacgcccgcggcggcggcgcataggcaaagtgtgtacgccggagcatcgtcaatatatgttgaacgtttcccgcggtcgcctttttgttgccgatttaatttatgctgatggccaggactttctctgctcgaccctttttacgccggagcatccttacatcatccccgctgccaattacacacgtaaacccgacgttgctatctattattttcgcgatacaccattttttaatggttataaaatgatatatatgcagcgcggaaattatgtcgcagtggtcaacccgctttcgtatagcaagttttaacctgggtgctgaaatattttgtgtggtgtcgttttttggtacattcaataaaatatttatgattgaaaatgagttcgtcaataaggaggatatctttggtgagatctacgaaatagactataagacaagaaagataaatagaaaggactttcctcagcactttactgagattgcagatgatatgaaattttaatcgttagctttaaatcaactgatttgagaaagcactcaaatcagttggtggtttatggggatatttttagacactaaagcctgcattaagacgttcaaccgctgctaacttttgctcttcgttcagcgtgggaggacgtccgaaacgttttcctgctgcttttgccctcataatacctgaatgcgtacgctcaagcagcagatcccgctcaaactccgctacagcagaaattacctgcatagtcatttttccggccggactggtcaagtcgacaccaccgagagcgaggcaatgaacgcgaatatctgaaaccgccagttgctctactgtttttcggatatccagtcaaatggacttccctgcagcaacttctacggaaccgtgttttaatagaaatatactccaggcagagctccgtggagccagcctaaaaaatcacttacgtaaccccagataaaccttcaggagagatcgatggatacgaggcagttgcgtatggccgttacattgtcagaattattacactttggtaaaaccgcagaggtggaaaacatcgcccagtctggtctcagcgtccagattgcaaaacttgaaaatgagttgggtttcaaagtattaggcgacattgatgataataaccagctttttaggtggagtttgaacttatcttcatgcgcaagatttctagataccatacgaagctgcctccattcgtatgttgaggatgaaatagatagaattatcaaggagaaagctatttgtaataaaatatcagaattgtggctatctaaaaaattaaatacaattaccgatatttatgacgaattagagattattgagtataaaaagaacattatattcaataaaattaaactaggcctaaaattaagtcatgaaaaatacttaatgctgaacgcacatctaaatggaatgaattatatttataaacatcgcgataagctccagcgactcattactcaatacaaacaaggaaattacaatactttcagtaacctaatgaaagaattacctactctgaaaaaacctcgttcgctaaaaatacaagatatcctttccgcactttatacagcaacctctgcaatgtcatttccctttacaatacatgcacataatgctgaaattagtgaaaaaatgccacaatttagcaaccaaccctgtcatcgcccatcctatacttgttataacagcaactattggcgctaaagccatgaatgctcctgcaattacaccaatagcaactgcgatagctgccaaagtagctgctaattcaggattattggaaatccattcagagaatttagagacaagatctgctataacttcaagaacaggctgaagagcaacttgtaaatcttgcatggcttgttgaaatttaaccgctggagatgcatctattttagaagtagcaccctgtaggggtaattgatattctccgggccaggcgggcaacggggttgatgcaacgcaacgggtataaaaggatcactcttctcctcgcgggaaatgcagctcaggaacaacattcatgaaattgtccctgaccgtggaaactgattccattaacgttctggccttcaacataggtcgtatcgctgttgatatcgatggtattgaactggccgacctgatcgatgtggtctgcgataacggttattcacttcgcattgctgacgcccccgggaggttggtcgctgtattcctgatcctggatccagatgtcagcgtaagtgacgtaccggtcgaagatgttctggccgtattcggaataggattccagataggcggtctggatctctttgccaatgaactcggcgtatttcgggatcaggtagcctttcaggaactccaggtagcgttcagcctgctcctgtgggaactgttcacgttcaatttgctgttccagcacgtagaacagatgtaccgggttggcggccacctccgcgtggtcgaagttaaaggtgacaaacgttgcgctgcagttgatgttagtgcactggtgataacgctctttggtcgtgtcagtaaaatagcgacttgtgcgagcgtgggcggcgtaatgacattttggacagtggagcatagtgagcacctcagagcgttattgacgcatcaattttaaccattaaaaccttatatatcaaacacataaacaaattttattgtgttatctcttcgctttcatactccacatccgaaaccttaacctcaagctctaagcccgtcgtgtagcccacgggaaaacacttcccgtccagggtggctgttttctttttttgccagggaaacaccaccatgattcttcttcatttcatttactgtcttgctgttctggcagatcgcattgtgtgcttgattgcaccaaagacgctgtttgccgaatggttgttctggttcactggtgatgcgaagtcgttactgcttgttgtccatgagctggagcttgcccgttcatatcagcaggacgaaacatcagcgttgctgacggaattctcggtctaccgtcatgccgataatgatgggcggcatgccaatgagtcgacagagaatggatgcggcaaagaccaaacggtcagcactgtagaccaccaacagtaaaccaattattaacagtgctgttgctaaaagcatcaaaagtcctttcttcaggtatactcgctggtccactgcgcacgaattttagcgccagatgaagtctgagacgtgacgaattcctaattttgactttatgcgccggaaaagtaaaacaaatgccagctttcgctaaccccaataacatgtttaatatctcacccgtgcgccttatttttatattctccttcacctcaaagtcgtaaatctcgcctgaaacgacgggatacacgcctaaagcagaaaccaaaaatgtcttcctgcgcttgtacaacagcgagacagactgtccaacctgcaccggcttcttcagacaaaaaagacaatgccctttgccacgcgcgtgacacgaagcaagttttcttaagaaaaaattctggcttagggaagtcttatgtttttagcagagatcatatgtcaattgactggaactggggcatctttctgcaacaagccccgttcggcaacaccacctatctcggctggctgtggagcggctttcaggttaccgttgcgttatcgataacggcgtggattatcgcgtttcttgtcggttcgctgttcggtattctgcgtaccgtccctaaccgttttctctcttcaattggcacgctctatgtggaactgttccgtaacgttccgctgatcgtgcagttctttacctggtatctggtgatcccggaaccaggtaagcgtaataccccgccgcgtacccgccgccgaagatatgggcgaagcatactatccaaatatcgtttttattctttctaaacaataagttaacttgtaattaaggcattgatttgcaccattttcactactaataaaacctcatgctattcagtaggttgtgtatcgttttggggaagaatctctctcaaaaatgccccttcacccactctaaacattcgcatttcgttcaattaacgaacgacaaccgcttcgggacgtaaatctttcaaggacatgcacaatcatcggtttgccattgatatccaccagcggtttacctggcaggcgcgttgaagcataacgcgcagggataatgacaacaaaactcatggtttgatctcttctgccaccagtgaacgggcttcattttccagcaggaccggaataccgtcacgcagcgggaacgccaggctgtccagtttgcaaatcagctcttgtttatcctggctgtaatacagtttgccgttgcacaccgggcaggcaataatttcaaatttgcattacagctgcttcatcaccttccagaagctgtaagaaatgaatcccattgaaaagtaaaacaccagttacccccgcacattcatttcgggaatttgcttcactgaccatgtcaataatggattgaattggtgtatcagctcgcaggtggcttcggtagatgagagtagtaagcatagttgcacactttaaaggattttcttctaaagtagcatacgaaaggtcagttagggctatttaactgaaaaatttacaaaaacgagacgaagaatcaagcaggcgatagaagctaggaagttcgaattaccagagtatctaattcctatgctgcagttgttaaaaacacatacaacattagaagcagtcaaaaaggcgcaaatatatgctggaagacatcttcgtccgtatgtatctacacttactgcggaattagaaatgtatgcaggatcggatcaaccatttcgaaactttgcagcagccttaaatagtccagaagtaaatacctttacgattgcattgcaacaagcgcaaaaaagtactgccacagggatcccggcaatcactccggtggtggccgccagtacaaattccccggaagtaaaacctttccacaccacggggggattgttcggtctgtcaggcaggaattcaatgacagccatagtccctcccttacagaatatctgaagctttagttgcgaggtaaatcactaccaggatgaggatgatgcccacgacaccgtagagcaggaaatccgtccaggttccttttcctttgcggatatcatggaaggaggtgatgacgcagatcctggcattttgcgaagggatgctctcccggtttgtgcgcagcgagtttaaatatcgaccaacggacgattttgacgcccgctggccgttagtggctgctcagttacagtaacgccatcgccggatggcggcttcgccttatccggcctacgaacgggtaggcccggtaagcgcagcgccaccgggctatttacagagcattacgcgctacggcgcagcatgccctgctttttcagccacaccagcagaatcgaaatcgcggcagaaagaccttcaatatatacaagataaagaggcctactatatctctcgtatcaagtcgaacacacgtatgtatcaaaaaaatcctaaccctgattattttcaagatggaagaattaagaaaggtacagagtatatacagatagatatagagacgttaatgaactcccttcaaccaggacaaacgtgtgaagtagctgatgcttatgtaggaatgaatgataaagtgccagctcgtgtaattgttcatcgattaacaaaacaacagcaacaacgaccagttggcaataatgcttttcgcttttgcttcatcggtcatatcgacagagttaacctgaaccgccacatcgcctttttccagacctgactgactgtaaaaggcggaggcattccttggatttatcctgtagccttccagtcggcctttttcaatgatgggttttaacaccagataatcatcaagatgcaaactttctgcgccagcatctttcgtcgattttgtaaccgggccgctatccatgccccccttaaaatagtccggttttctggtgctcatatttgattttgttgacgcacagcgcctgttcatagcttgcatctgagcaggtgaaggattagacatgcccgacgggcacgtcagcctagcacattggggttttcagaaaggtcatgccagtggtcctgattaataacctcgaactgccactacaataccgcagatgatgcaaaggacaattacccaaagaatggctggcattggattgccatttttagcttcagatgccaaatacgcattaaactcttttttactcaagcgataactgctgtctatcccataacacaactgcttctttcaggtccccaacaataaatggtgctttaccatctttatctgtagcaattgtcttattggataaaacaataactggctttcctgataatagcttacgtgttggatttgttggatctggttgaagaagtgggcgaccatctttatcttctaattgatctaagtaattgaatccatcttggtttgtaataatgtttgctacagccgagaaagctgggtctaatgtgatcaagcgataactgctgtctatcccataacacaactgcttctttcaggtccccaataataaatggtgctttaccatctttatctgtagcaattgtcttattagataaaacaataactggctttcctgacagtaacttacgagttggatttgttggatctggttgaagaagtggacgaccatccttatcttctaattgatctaagtaattgaacccatcttggtttgtaataatgtttgctacagccgagaaagctgggtctaatgtgattgaacgcatgcgggattttacttcccactaaagaaaacttatcttattcccactttttccagtagctggtccgtccaactgtttacagatacagatctgctgcgacatttcgttagcttgatttcaggataattatgagcaagagcaccgctgagatccgtcaggcgtttctcgattttttccatagtaagggacaccaggttgttgccagcagctccctggtaccgaacaatgacccgactctgctgtttaccaacgccgggatgaaaaacggataccaagtgtgagacatgatgttggaggatgaggtttcacaaaagctggtcgatggtacagggctgccagtagctggcttgatgtgatgcagcagcatgagctgacggatcatcagcgtgaccgaatatgtcagcacagaaaatattgtctttcctacgtaaagctcatcagcaccctaaagatactggatgtgacggaaattgcgagagctgcaaaggccgtccaggagcagatggaattgagtcagctagatatagatgacgttcccggacgataatgttgacgacagctggctggaaaaatatgaaccgcaattttttgtttatccgggcaagagtatttatatgcggatcaatgaacaacataatggtaactatatctttaccttaggaacattaccgacatatgtgtgtcgtggttcaaaaaaagaatgatataaacgagaaaaacattatattttcctcccttctcatttatgcttgatttaaaatatcaggattatcttagaaatataaagtgcgacttaaaagatcggttcggcgttcctgtgggcgtccatatgacaggaattcctttggcagtgagcacgttactggctattttttgctacgccatgctgcaagtgtccctctggttgttgctgtttcgctggctcggcttacccgaatttaaggttatgatgggagtattcattgcagcgattgtgtattgtctggtagtgatgagcacgatgtttctgactacacggggttctttgcctggatataagctgcatattttcgtcattacgcgctcgcatgcataacaaaaaaagaacatcagattctttttttgttaggaatgtttttttttctgaagatacgatttgtcggtgctgatgatcgaactgtacatctcttaacaaaaaaaaatcttttaggggaggggcattaagcattatcgatttattcctagtttttgacattatttttctactcccccctgttcaaggggggagatttgtttagctcaaaaattatcaatccggtctacatacatgccgtcgccattacctcatggcggttgtggcgaagtggttaacgcaccggattgtggctccggcattcgtgggttcgattcccatcagtcgccccatttttcttaaataaattaatatgcgggtgtggcggaattggcagacgcaccagacttaggatctggcgcctttggcgtgggggttcgactcccttcacccgcacttttaattaaataactcatacatgtcttgcggaagtagttcagtggtagaatacaaccttgccaaggttggggtcgcgggtcggtgtgaagtgggggaaaaggtggagatgatgtcaaaaccttacctatcactatttggcgaaggttttattagttacgctttagcaaagggtggctattcagaagaaacagctattgagttttcaagaagtaagaatcatttaaatccaggtggttgctccgatccgaataacttccgaaccaaggtaaatgcgtgttatggtgattttgtgcgcccataagggggcaaggaaaaacggtgattgcaagctgttaggtcaaccccggtgtgaagtgggggaaaaggtggagatgatgtcaaaaccttacctatcactatacggtcctggattcattagctatgcattagcaagaggtggatattcagaagaaacagctattgcgttttctagggagcatgctgatgaaaatagagctggctgttctgatccaaataacttccgaaccaaagtcggagcgtgctatggggattacgtgcgcccataagggggcaaggaaaaacggtgattgcaagctgttaggtcaacccagtaaggcaacagttcagcctgtagccctgatgagattaaatgtttttgttccctcaagcagacctgcaaaaggagccagaacatcaatcgatgcgacctctgttctcaaggatttggaattctcaaggcgagagggctacgacgatattcgtattaccggcgaacggttgagtatggccatcgacttcaaggtatgggtaggtatcattgaagcttttagtaagtacggtttaaaaacgaacagcattaaacttacttttcattcgttgggatctacatccggacgcgcatactccggccagaccagcgcgaccagttccgggtaggcttccaggctaaactcgcgaaaacactggcgcagatttaatacatctaaatcggagtacgacaccttctcgccattcagacagcgctttttgatattgtcgtaatatttataaaccgccgaattaaggtcgctacagcggcgctgcgcgtcgaacaggccgggcgtatcattaatttcggccattttcattcgcttaattaaacacgagctaaagtagatgttttatctcgtatggtagataaacaaaaagagaaaattagggaacttcaacaagcttataatcgtgccaaaacagaagaaggtgaagcgagtcaatcagcgcagcggtacgctgaacaaattcaccgggcaacaggtgaactgaatcgatttgaaaacgaattacgtcagtcgaaccatgaattagaacagcaaggtaatcgtttattgaattttggtaatcgtatggagacattaggtaatcagcaacaccttatccccgggcaaaaagtgaacatgcaaatcattctctccccactttctttctggcattggcatcacaacccgacgagtttctttacgaagacccgcatcgtactgagcacgtgtggtgcttaatgtccatataacttccgctgttttcccactgatactgccacaacaggttgccttaccacctccgtgagcaaacgcatttggccctgccactccgttaacactgaatcccagaatgggcctgtcaatttcaagtgctgacattatttacagaaagggaacctgtccaccggacagtgtatggcttgcacaaagaacttaatgttgttgcattaagtcagaataaaaacagacgaggtaaaaatgaataatgcatttaaaaatgtgctggatgattattttttcagtaagtctttgcgtccggcaacagagtggagctacaggaaagtagtgaggtcattcatatcctttgccggggaagatattacacctgaacgggtaaataaaacgctggttcctgagaaagtgaaacaccgagactttcgctttgtgactgcaaataagtttttgtttcggggcgaaggcgaactgtggttaattccttcgcagatgtgtcttccagttgcgacaggcgatcttcagcaatccggttacccgttttgaccaggctttgtatcaactgtgtgattctgaacatatgacaaccttctctgtgtttacgtttcgcataaaaataacatgcaacaacagataaaacaaacatcacagtgaatacaaaacactggttacctctctggctattcaggggaccgatacgctggcgattactgacgatacatctttagatggtcaggcaacaattaccctgaaatacctttaagttatttgggtattaatatcccgctctgtcgttgtgtaaggctatattagcatttacgcttacagcggattatttaggtttgaatatgtagagggagtaacttccctctttgtttagaaaattctgtttttaatagcgagagtagcccactttattaaaagcgttgctgcgatcttcacagtaccgtcatcttcgatttcgatggtggtgcccgtttcttcggtcagtgcacggataacggaaccgcccttaccgataacatctttgatcttgtctggattgatcttgatggtgtgaatacgcggagcgaattcagagatatcaccgcgtggcgcgttgatagcctgttccatcacgcccaggatgtgcagacgcgcacctttagcctggttcagagcaacctgcatgatctctttggtgataccacgccttcgccgttggaaattttacgaacagtgaatgcagagtgcagaccgcggttacgaatagcgataaccacgccctcgaatgcctgcagacgttttttggaaccttcaacaacccatactttcacttccacggtgtcacctggacggaaggaaggtacgtcctgcttcatctgctcttgttcaagttgcttaataatgttgctcataatttaatctcttatcctgggtaaactgatattcgggagcgtattacgctttcctcactaacaacaataatgccggaattacaccctcccacccggtgacgggtgcagatggcacgatctccgctgccctgacaacgattcatgcaggtgagatgaccgtatccgcatcccttggtaaaggggatgcgaagtcgcttgtcctcacggccatatctgatgaacagactgcgaatgtcagcgtgacggcaggtaccacttccgcgaccgcaggacaggcgcaacccgttattctgacggccactgtggtagacgggatggaaataatttcgaaatatcttatatacagtaacagctatgtactgaacttcattaagtttggtggcaagcgtacaaccgcgctctattttgaaccggcgttttttgctctggcattaatctcaatttggctcagcatcaaacagttcggtatcaaaacccccaagaccgatgctatgattcttgcaggaatcgttctgtcagggtcgttctccggggtaatgacgtttattctgttttacctgctggagtgggcgttccacaagaggaagaagaaggcgaaacgaagaaggataagcctaacttccaaacaacgaaactcaaaggttcatttattgagcgtgattttgacgataggcctaaatttacagctgatgctgatgaacctacatttacaaaagctgtgggagataattggtttaaaaaggtgtatgagaagcctgtagtacaatcaccagcaggaaagtaagggggagcaaaagctctctcttttttattaacgaggaggaaaagccatgaaattttattttcctcttcactcgtaagaacatatgaatcagcaaacaattttctcaatcgttccgtttctttttgcttacgctcatcaactttcgtaatgattttctcagttaattgatcgtattgttgaccaagtgtttgagcttgttcagttgtcattacttcatgattcagtttaatttcagttaacttttgtctaataccatcagataacttaaaatagtcgccaagaacttttttagtcgatgaactaatttctccggctgaacagcatgagcagcaccaggatctgttcaacagtaaccgcctgaccttctccgaagcgctggcgaagctgtatcagcgtctgaatccgcagattgacatgggccagcgtacgccgcaaaccatcggcgaggagctgctggactaccgcaactatctggaaatggaagttgaggttaaccgtggctcagacggctggctgcgcgcggaatccggtgcgctctctaccggtgaagccatcggtaccggtatgtcgattagttgagattgtcgtcacgcagcgtttttttcagcagatcgccgccatgtccataaaccagatgcacctggctggcgcctaattcattcgctgcatcaataacatgctgaaccattggctttcctgccagcgtgtggagcactttaggcagatcggaatacatgcgggtacctttgcctgcggcaaggatcaccacgctcatcgcactgtttaacatacgcatcctgacggtagtttgtgtgagaagtaaaaacgtttgagtcattgatcctgaaggtggccttcaacctatgctctataaagatggaaatgatacaattggccttacgttcaatggagagatttataattatcaggaattacgtaaagaacttgaggagaaaggtcatgaatttcagaccaagtcggatacagaggtattactacacgcttacttagaatggcaagaagattgtgttcaacacttaaatgggatttttgcttttggtatttgggatgaaagatttgggaaattgatgctggagataatcaccaccagcgaggccagaacctgccatgtacgtctgccaaaaagcgagagcagacgtagcaggaagaaggtcgccagaattgagccaaacacttcaatcgcggcaaaaattccatttcttacagtgaggtgttcgaaataaccttccactcgtctgaacagcaccgcgccattcagaaacaaaccgatatagacagccagcatcagacacaatctttgctgggtaagagacctaatatatttcatgcaagctcgatgcttttatggcggaatttttacgtaaaagaaaaatagatcctcagccataaccttcaaaatgtatcgttaaaggccgctataagcggctttttttgcgcgtacaccctccaaaagctgataagacaaaccattactggtatgttatttatcaatttcaacttgacctatggtatatttatttgtagcctgattttagaaaatcagtcatcaaggcaggacgcccacgaagtagctgccggtggcatacgaaacttcttctttattatttaccttctcgttccgatcctgtccatcctggcattaccccatttcaccagaacgcatttcactgttgccgatagcccatggggtcgactttccgaccgcggtctcactcagaaggatggccatcttaacaggcgctgcctggcgttcgtcctcgcctccgaagtgaaagccctgctcatctatatgccggatcttcgccattacatactgttctccactttctggaacaccggtgtgcggatccttatgccggaggattttcagataacataaggagcctcagactaccgatcttttgcaattatcacaataccttaaattgggtggataaaagccgggtgctatagtgttcttgccgaacgtcgcacggcaggaggaaaacggatgattcaatgtaagcgcgtatatgaacaggcaacgtcagacgatggttaccgggtgctggtagacagactctggccgcgaggaataaaaaagaccgacctcgcctgtgatgagtggcgacgaattcacgccggattcccttaaagcactggcgctgtggatgacccgcaacgccaaaaacgaatccgctaaaccggaaaataaggcggaaaaagaggaagaggctgagtaagccttaacagctttcccgcagacacaggctggacgcgatgggtttatggtcgcgccagtctccgtcattaagacgttccagtaacgctttcccggcttcaatcccaatcttgcgatgcggtactgccatcgtcgtcagcggcgtagttaccacgtttgcgtatagtcgccatttctgtctgattcctaacgaactgtggcaatattgtggcaaaaaatccatttaaattcgataggtattgattttacaagatcaatttacgcattcgtaatgcgaaggtcgtaggttcgactcctattatcggcaccatctaagaaaatcaatcacttatcgtcaaaaacctaaaggattgtatctttcattatcatccttggtaacacttggtaaacgcctttgcgttgaatctacagtatttgtatacaactttgttttgaaagcctctaacatcttaatgacttccgtaacttcatttgaatttgtatgaattgtatagattaaatcccctattccttctttgaggctcaccttatccttcttttttacagtatctactaatgtgtcgtaataattttgaaattgctcatcataatttacaatattacgtgctgttttttgaatgtttggcttcgctgtatctaaccagtaatttgcattgattcaacgcaagtgttctggctcagatttagctacgatttgtatttggattagtcaacgagtggcaagtgatcccttagtacgattatgtagtagacttcatgcagccaccggtactctccttagccctgagggcttaaataagcgttttaacgcaaaagcagtgctgtttttaaaacatatcttttctttattgttacagcaaaaaatctgtgaacaaacacaaatctctaaccaactttttgcttattttgagcgtattcgctaaagaatctggaagtgatggtggtgggggaaggattcgaaccttcgaagtcgatgacggcagatttacagtctgctccctttggccgctcgggaaccccaccacggggtaatgcttttaactggcctgcttcctgttggaagcggggcgcatcatatcaaatgagacgcccctgtaaagcattcctttaggaaaatgaagctgtttgcctgctttttatccgcaaaggcgtaaagctaatcaattcattttccgacacaagaggaagaagaaggcgaaacgaagaaggataagcctaacttccaaacaacaaaactgaaaggttcatttattgaacgagactttgatgatagaccaaaatttacagctgatgccgatgagcctacatttacaaaagccgttggtgataactggtttaaaaaggtatatgaaaaaatagcaacaccaccagcaggaaaataagggggagcaaaagctctctcttttttattaacgaggaggaaaagccatgaaaaatctacagtatttgtatacaactttgttttgaaagcctctaacatcttaatgacgtcagtaacttcatttgaatttgtatgaattgtatcgattaaatcccctattccttctttaaggctcatcttatctttcttttttacagtatctactaatgtgtcgtaataattttggaattgctcatcataatttacaatattacgagctgttttttgaatgtttggcttcgctgtatctaaccagtaatttgcattgattcggcttattactgaaaatccagcagaactgatttttgatgtaatgcctgatagaacatatatggcagttatagatgaagattttgatattgataaatttgtagatatcggacaaggcactttgaaatttatttgtccaatgccgtataagttaggaaatgagcaaacggttgattttgaaaatgatggtcgagggttaattgccaatgttaaaaacaaaggctctgtgcattcaaatccgattattgaaattgatattaggcttattactgaaaatccagcagaactgatttttgatgtaatgcctgatagaacctatatggcagttatagatgaagattttgatattgataaatttgtggatatcggacaaggcactttgaaatttatttgtcccatgccgtataagttaggaaatgagcaaacggttgattttgaaaatgacggtcgagggttaattgcaaatgttaaaaacaaaggctctgtgcattcaaatccgattattgaaattgatattattcaaccacaatctttccagcagcttcgcaagtttgttccggtgggaaatcaatgcggtaaatgcgttcgcgcagcgcgtgagatcatgcaggacgaactgatgcagatcccggaattcaaagagatcgcgtaagcctatatcttttttttgacatccccgtagcccgatctacgcttcaatgagtggaagcggagggactatataatgaaaggtgatgttaaaatcataagttatctcaataaattattgggaaattgaagtaatttaaaatttttgtcggctacatccgggaatacagcggcaaaagcaacaagaaggaaaattaacaaagcagatgtaaagaataccgctttgttaatctggcttttagacttctttgggatagtatcattttcactcataattattcattccattaacttagatccgcttaagatgataggcattgcctctcatatagtagcaaaaaatgagcagtaaatggggcatataatcagaagtcgcgtcgtggtacctgcgcctcttttaactgggggaaacggtagtcgatgccatagcgctcgccgaatacctgaaaatcttcaacaaaaaatatgcgtttcgctgatttattttcactctggagcatcattcggggcctgaatcgggaaaggacaggccaaacagtaccatacaactgcaatggcagcaatcaccgggcgcagacactattacgctccggacgaagccggagcgaaggcatatatttccttgcgagagatatatttatgactatcaatagtcgttataatgatttaactaggcttattggcaactatacagatcatgctgtacgctggtacaatacgggattagagcgtgtatggggaccggattctagagattggataagatataatcaatttagaagagaattaacactaactgtattagatatcgtttctctatttccgaactatgatagtagaacgtatccaattcgaacagtttcccaattaacaagagaaatttatacaaacccagtatatactgggtttgtataaatttctcttgttaattgggaaactgttcgaattggatatcttctactatcataattcgggaacagagcaacgatatctaatacagttagtgttaattctcttctaaattgattataccttacccaatctctagaatccggtccccatacacgttctaatcccgtattgtaccagcgtacagcataatctgtatagttgccaataagcctagttaaatcattataacgactattgatagtccaaaaactatgttctcggatagatcaggtagagaacaagaactgaatgtaacggtaaatatgacaaacgttttagatggaaaagaattagcgaacggaagttacgcatatacgacaaagcttcaaaatcgtgaccaaaaaagaagagcggaattttaagggtggtgagcaagttggggaaactcggttttacttttaataaaatcagaaaagattatattcaaatgctagttggaagaaaacgcccttcctgggctccgaagcggatcagtatggcaccaccgttgtcgcgggtgaggatgcgcaaaaagacgtgggtgtcgccacgtttaacccctttgccgatctcaaggcgatgatggacaagaagaagtaatatcgacggcttcactgcccatacctgccgtatgggcacttatattccttaaacatttcattaaataccctttccgccagatttgcctcgccgccattctgaatataaccctcttcctcctgcacccgtacgacgtcaatccatgacctgtaatgtcccggaacgtacgggctaccaggttatttatggcgtgtgggaaattgcggataccgcaaacagtttctatcaggccattgacgttgatttcggtaacggcggcaacgtcacgccggacggcaccccagcggtgatatcccagtggagtaaaaccctgagcggacagattgccgggaataacctgaacacgggcgataaagtgattgcacgcttcttcgacgccaacggggaagttgccgccaacataaccacctttcctgaaaatgtgaaccccctcgcatggagggggctcctgattacgactgtaaatagaccacctgcgtctgcaaatactcattcagaccgtgtttaccatctgccccgccgattccggatttccgccagcccgcatggaagccctgcatcgcttcaaagttttcacggttaatgtaggtctcgccgaacttaagccccttaatggctttcatggcgacgttcaggtcctgcgtataaacatgcagtcggtgatgctggatttacccttaacgtcgatagcgatgatgtcctgacctttcaggtcatcaattttgtcgataacaaaatcctggagtgctttaccctgcaagttttccccctgggtgaatgagattgtacaactatgaattcgtggccagtcagtatacctgaactgacgccagtcgcgggacaaatgtcaccgcccggcttttgaaggcgggtatcatcccagccaccgcctgagattgcatcgccagcttcggaagctcttgttttccagatgctatcctctggcatatcgaggcgaacgtcgatccagctattggcaggaacatctataagagcccctttcgttttaacaatttcgccttcttcgttgagtatgtatttccgcttaaaaagccgaatcgtcagcccaccgctttctgtctgctctgcttcaacaacacccagctcccccatgccgccagggtccataggcgggcgggggtggccgccaaaagaagccagattaaagagacgctggagcatatggctaccactcttgcccagggcgagcgcattgaaatccgcggtttcggtagtttttccctgcactatcgtgcaccacgtaccgggcgtaacccgaagactggcgataaagtggagctggaaggaaagtatgttccgcactttaagccgggtaaagaactgcgcgatcgcgccaatatttacggtaactgagtttaatcatcagggttaaactgagtttaaagaaagcaccttagttatttcaatgaaccatattttgctatttggagtgatgagcacctaaatattattggcgtaaacagttcggttttcgaccactatgacagaaagcctcatcacggtgtaatccgcaaacaggatttaacagaactggatagaaagcttcaagaaatgcagattgcacatagcgggaagattaatctgctagttgtacatcaccatccaatccagcagccagatttaccttttgacgccgctgaccatagcatctattcaactggcgatattctcgccagaccagctactgcgcggcttttgtggtgttatcagggagtttacaccagttgttgttttcgttaatcccaccgttcggtgaggtatagccgagacagcccataatggtgtcgtacagctcaacgtgacggcgcggtaccttgatctctgcctgctgtttcagatgggcaaacattttggctttgtccggattttccaggtacttatccgacatccacatgatcatcggcacgtgaattccgtcagcaaggaaatttacggctatgaagcgctgattcgctggatgcatcctgtaaagggagtgctctccccagatagctttattttcgccgctgaaaaaacaggcatgatcaacgagataggtaaaaccgtacttaaactggcctgtagggaagcggtctcctggactgttccggccaggatctccgtcaacgtctcgcctgttcaattgggcagcaaatcatttattaatacggtgcagtccgttggactcacgttctgtacaacttcgacatattttatgtttccggttatctgctggatgtgctgaaagaaggtgaaatacttccagccactgtgcttcgggagatacaaaaacaccacagtacagagtcaggtccgctttataaaaacatccggaccgatgaggaaagaaagccgtttcttttccctcttgaatatataacaccagaatggagtgaattagccagagaaataacagcactcagtattccgtaaataaatattattccgcagtagctcagtggtagagctatcggctgttaaccgatcggtcgtaggttcgagtcctacctgcggagccattatgcttccatagctcagctggtagagcacttccatggtaaggaagaggtcaccggttcaagcccggttggaagcttgggaataggtttaaaacttttttggcccgttggtcaagtggttaagacaccgccctttcacggcggtaacacgggttcgaatcccgtacgggtcaggaatattttttatgttcagccaaaaaacggattcgcgatcggtgggcaacgtcccggccattttaagtacgcgtaagaccttttcttgcattggctcaagcctggaaacgggtggtatgacggtaaaaggcggtttatgtttatcttctttgtcaaaggggtcgacccaggtttgtatcaggtacggcagatcgctctctttgttgtaaatcgatatagtggcatcaggactatcagccaaaaaaatgacgcggctggatatgatcgctgaagtaactgaagaatgtaagattctttccaaaagacggatgagaacattacgccttggcttctttaatgatggcgctcatgaaaaaatctatccccttatttcccttttcaagaaagcaaatccggaaatcaatattgcctttactgagctgaccctgacaaatcaggtacagtccctgcttagtgataaagttgatgtggcaattatccggcttcccgcgagcgatccacgtctatggacgatgtggtcaccatccgcacccctggtggtgaagtggaatacgaaattattaaggttgaatatctgtaattcgcttctctactaagatgttgatacattgtaaagaaaagaaaaaggccgcttagcggccttttatcaactcaaggagcatggcattttgctcgcctgctgaaagaaatccctcgtttcacacagaaaatgtgttcgattcaggatatccttaacgtggcagcgagattttgcgctcttttacacgtatcaagtttgtcgaagagataaaacaggttgtagataaagaatttgaaacagcacgacgagctaaaaccgatgaagaatgcattgcatgcatcaaaaatctgcgtgctgaaacagataatctacacgaacaagaacgcctgttaagaaccagagccgcacagctttacgcgaaggtcgagtttgttaaggaaaataataaaatcgtcggttatgttatatccgccgtaaacgtggtgctatcaggcgcagtctgcgagtttttacctaagcggcgagccagctctgattggctgccacacagagaaataatcttattttgaatgttatggttcattgagcctcctaaattccataccacatacttgataatttacttatcaatgtcaagaaatttaactagccacatttgaaaagaaactttgtatgctggacaactggttagatttggaactgaaaatgaactttgaagaacgtttgcaaagagctattgatgaggcaggtatatcatcaaaaatgtcactgctgagcccgtatgctgttttttgctcggtgctgacttcgcctgagctggaagagccatcactgccaagttgcgtacctgaccccgaattgatcgaggcagaactgtcgatcctggtgttcataaacgacagctggtacatacgggtatcaaagcgatagaagagaattccaccattttccatacgccaggaaagcccgtaccggctttctgccacatcaagcagcccccgcaagcttcagcgtcttacttgccttattgttgatactggctgtaacggttttttcgcctgcaagcgatgaagtaacgggaacaatgaccgtaccatctgcttctgtgatggctgactctgcaacagtggcgctgttatctgcctgaaggctgactgactgaccggggacaggattactctgcgcatcgacaacggtcacacgaaatctgttttgtgacttaccatctgcaagggcattgtcttcaacaatatccagcgatatcagtgcggataaatcctcactcagtatctctccgtccagcatcattgcagcaaaagaaagtgccacgctcagcgtcacagcccgtgatgtcgaagggaatctgctcccgggtctgaaagataagataaatgccggtttcacgcctgacctgaatatgaccgtatccgctttcagcgaggtatcaccgggcatctacgcggcaagtgtattgggtaaaaaagcaggtacatcccaggtaagtgctgactggtcagcctgatgcagttttatggtgcagcgaagactttgaaaccgctaatgccaccctggattatttactgcttaagtccggccgcaaatttaaagactattacaaagctgtcgcaactaatttccctgttgttaacgaacttccaccggaaggcgaaatcagttttaccttctgtgattattatcagctcgataaaggcaaaatgaactgggagcagatccctggggtttctctgcccgagcatcctgcgttaaatctgatgaagacgaaaagataaactacgcctacacttactttcaaaaaagattagaaaaacaggaggcatgtaagttacttaataaaagcaaaaaaggggtaagatattcagaggaagagtatattcagtgtctcgatgcaatcttaaaaatgataacatcttatcttaaggtcgttcgtatactggttccgtcaactgatgacgcttacgacgtattcgaggttctgaatgcaagaggtatcagccacagctctaccgatcggagtaacgggaataacaggagcaacaggaccaaccggaccaaccggactaacaggaccaacaggaataacgggaccaaccggagtaacaggaccaaccggagataccggaccaacaggagataccggaccaacgggagatacgggaccaatcggagatacgggaccaatcggagatacgggaccaacaggagtaacgggaccaacgggagatacgggaccaacgggactaaccggagtttcaccaactggattaccatcttccatagaactaaccttactccaccctacagtagtggacatatcatcccatataagacgttgatttctttctacaggcaattgttccatttttaatggcactccaatacggaaataatctggttcctttgaatatttatcttcaaaccatacatctaaaaaagtgtttggttttttaatatcaatttcaataatcggatttgaatgcacagagcctttgtttttaacattcttttaatagatgtcatattgatttgaaactctgttcggcaaatatcatgcacatgaaagttaatggttgtaattttaatgcggtttgtgattttgctcgttttgatagccaatgtgagttcacctatgatcgaaaaaggaaattttcatatcaatcagaaagtgatttcttcgatgttgtcacaaagttgtttagtaatgcaaatgattattcaaaagcaggtgagtattactataagaaaagaaaggcatctgatcaacgagttacaagagttgtgtgataatttaccgcaccattcagaggcgctcaacgtgtgattcacgtgtttttaacatacgcctgacgaggggaaataatggaaccgaattttacgccagaacagattgaaatgattaaccgcattgttttcgagaagatcgaaataatgcatgattaagccgcgagccgtttccggcccgcggcggcatgacaggtgatgagtcgttctgacgatcaggcggcttgatacagctgctgcgtccggtgttgctgacggtgtaacggctgtgacattcagagcactcattaaggaccagaatggaaacccactttccggtattcctgttgactggaaatccagtaaggacagcagcatcgtcgtctttaataatgcgcaaaccgtcacgtcagaaaaggggattgctgaagtacgggttaccagtacgcgggcgtacagtgacgtggtagtgactgcgtccacgaatgcatcgtcaaacagtgatttttactgtttcaccagagccagtggctaattttcttttaactaactctgctgctgtttttaattccgtctgagaggatgatgcttgaagcttgacgctagttatactctctcttttatcataagtttgtacaagttccttaatagaatctagatcactatatccctgaggtagtttgcaaacctcttcaattaattcctcctttgttaagtcttgagcaacaataatacctttccgtaataataggaagaaggccatcagaccttcaatggccagcggcgcaccgaaaatatcccccacatagtgggaatagtaagaccagtttgtcccgaactggaactccatggtcagaccggttgccacgcccagcgcaaagttgataccaaacaacttgccccagaacttggtcatatctttataaatctgtttgccggagaggacgtaaaccgtttccatgatggccagcaggaacgccataccgagcgtcagcggcacatatgtaggaacaaagcatcattctatagagttaggatcagatagtttaatagagcatttattaactccaatgcgagcgcgtgatctacctggagttggagaattagaaacgtctctttatttgttatttaaggaaatgaaaaaagatgcaacagttgcactttcaggcgaatccgcagatgaagtattctcaggatatccatggttccatcaagagaagtttctagatgcagagatattcccttggagtgcgttagctacaatccattgatttcgccgaaaattaaacaaacccaacgtgaggttgaacgttatcaacaaggttttgaccgcacgtcattgggcgcacgtttttcgatgtggactgtcgggatcgagaatggtcttgcgcatccgttagggcaatcgctggaacagcgtgaagcgtggacgcggcagtatattaaagacggacatccgcaccttggcagtgcactcgaatacatcaaagttcatctgcatagttcaagggtacgaacatgtctgctgaccgcacccggcgtaatattgagcgtttcagcggctttactgaaggagttcaaccgcgcagcaacttcaaacgcacgcagtgcatacaatggcggtaaagacataacgtcccttaaatgaaaatttcattatgctaaaacttgttccggggcaacgccagcaagtaaattatggagaaaaacaatgatccccaatataccgagtcatatcgataggggtcaaatttactacattttcacctttgatatcagccaggctcattttctgaaccggtgccggattaatttccctttcggtgggctgctcaatctcatcaggcgtgtaaacgcctagaatcacgtgtgggcagtacaagcgcgcccaatatttcacgccgaggtaggctatttgctggtcgggctttgaaacccacagcggcgaatttcgtgtaaccacctgcgacaggtaaagaggtttatcccaggtgatttcacagcagtaccgcaggtacacgatccggcaaggttgtgacgctgatgtatggaacaacgtgtgacgtgagaacgtccgaaacgaacgtatgacaggagatctgctatgtctgccaaccatgctgcatttaatctgattttccgcttcgttgaaaattatgttagccctattgccgggcgcatctcttcccagcgtcacgttctggctattcgtgacgggtttatctcacagatgccgtttatgattgtgggccgcattcttcatctattacaaagctcatctgctggttgctaatgatgataaattgcagagtcccatggattttggggtaggaaaagcctggatatgatgctagaaatcataacattaaaaagaccgtgagatgcagtatgaaaatcttaggattggatgagtacagaacccttcgtgagggagggacaatgaagtattttgaactggaacgcatgcctaacagcacttgggctgccattttcgaaagtttgttatcgatattcagtaggaaacgccttaagcaaatcttctttactacgagtaaattggttacaacgacactttgctaataaatcttcaagcgaataattgccagctccgctaacgatacataccttcggcgcattgttatcagtggtactatagtaatcacagaatttatattcacctccaagaactttgtcactaaaagcaacccaaagattaggtatgccataagtatctgcggctatcaacccatggtgcccgctgtgataaaataatggatttgcttaactcctcagctcaaaaagattttgagttggcatatttgaatattggaaacctgtattctacaggtgagtgtgttaatagggatatgcacgaggcggtgatctggtgggagaaagcatccattaaaaataacggacaggctgagtttaatttggcaggggcttatatgagaggtgatggtgtattccaagattctggaatggcagatatctatttgctgccattcacgggcagggcgtggcgttggcaaacaacgttatggcgcagtccgaaattgaggcaggccgtctggtttgcccatttaacgatgtactggtcagcaagaatgcattttatctggtttgtcatgacagtcaggcagaactgggtaaaatagccgctttccggcagtggatactggcgaaagcggcaagcgagcaagaaaaattccgcttcaggtatgaacaataacgtttgtgtgccgggcagcaagttactggttatttgcccgataattacgccgcgcaattttccgccatcaaagtaataagagacggtattgttctgaacaaatccatcctgtacaggtgtctcctgataaagcaggatcttttttctgttgccgattgcttttttgccgaacaattcaactaaatccccgtgagtggcatttaacaatggaacgccagagactgagacactgactcgttccgttgtattcacaccctctttatggccaggtttaatcccttcgggattaaagttgattgaacaacgcccggttgttgagccaggcattgcaggtgatgaaatcaagtccagttcgacgagttcagcatcctcagggtctggtgaaggtcattcacccgaacgacaatcccggcgtcaagtgcatactatccgcaatatttgccgtgcgttcctcagcttcccatatgatcgaggaatgtcgctaaacgtccctggtattaaggggcgaacttacgttcaaaatgattttctacctctcttccaaccaattcattttttacaagccctctaaacgtcttaaattgctctttaaagacttgtttcgtttgttgatataaaacctttatatttgtctgtaaatctcttatatgagcttttaatgagcttatttctgtacttaattgtttgttttccttctgtaaccctacatttctcttttgagattctttaagtgagtcacatatctcatcgactgcactatgtaaaatgcaactatctatcttacctttaagacataactgataatcacctacccagtacttaacttcctcactatcatgaggaggctcagtcttgttttttataaaaagtatataatcgcatttattaacaaaaggcttccacttatccaaaatgaatgttttctctcgactccataatttagcaaggtttgatttcgtcagcggagcattatctaccaatacaatagttgatttacattcactaccccagcttgaagcgaaatctactgaaaaaaccacaagcttcccgttagataatataagtaggcaccagattgactatttaaaggatacacaagaacagggagcactttgtttctttttaatagaattcagaacggatcaggttatttattttgttcctgtttctgtagtagcagaatactatgaagccatgctgtatgacggaggaagaaagtctattccaagagaggaatttgagaaaagagcgtatatagtaccttcttctcggagtggtctgattttgttgcatcttgcccattgtgcgcgaaagccggtgcgatctgaccagcttgcggggcggttttatctgtcatgagccacagtgtgtatttctgaaatttaggtgtgtttgtcacctgcataaccacttgtaatccaggtgatttatatcccccctcataatttttgactgtaccgagtgccagcccgcaagcttcacagaaacttttttgcgttagcccctcagtgccgtaaacccttttttaccgcaaggtttaccctgaacaatttttgagccacagatataacggtatttattttcggttgaacctgatttgaacataaaagatccacatttcccacagaaaagaattccaattcctgatagtaacgggatttcgggttcagggttgccctctgggtattttgaggagcttctagtaaccgctcggtgtcggtccagttttgatagagtcatatagtctatttctgaaacaatagaaacatcatttaactcaacagccagtgaaaagtggtctctgaactcaaaatataaatttttcacaccatctccgtgacggtaattagtattataatgtgctattcaactttgttataaacacgagcaacataatgccctcggccgtcgccatgcccaagatccattgatgcgagagcctgtgcttcttctttactgaaacctttattcatatgaagattaatgacatcgactgagtaggcattgttctgggattttgcagggaagcagattgctttgccgatggtcaaagggaattatccaagggaggggtttgtggagtggcattggagggaggtgtttagaggatgagtgcgaaggccgcaccgcgatttaatccataaccaattgaaataagtaactttataaaaacaatgaatcacgatgtatactcacatgtatactcaacgcgattccctgtgaatacagctagctaaaaactactcttcatctaacaaatcttatttttcgtgcctgacccatgcacaaccataatttttcgatcattatgcgtcgagggcgtttccttatcgcgtaaattcttatatctccgtttcatcgattgccctgcggcagcttcgcagataacttcatttggattttccttagtaaaagtggaagagcttgcaaataggctgggcaagggtatcaacaaatgatcaaaacattgttctccggcgacaagctctcgaacgtacaggacatgccgctgatcttcgctatcggtgttgctctgggcttcaccaataacgacggtgtatccgctctggcgtccgttgttgcttacggcatcatggtgaaaaccatggctgtggttgctccgctggtcctgcatttacctgctgaagagattgccgctaagcacctggcagacaccggtgttctcggtggtatcatctccggtgcgattgcagcgtacatgtttaaccgcttctatcgcatcaagctgcgtgaggccatagtctggatctgcgtttgactttccgggcgcagcctggcgtcatttttatcaaacaggatcttatctgacaggcccagagaccagtcgccattcagttcgttaaagccataggatttcatggccgcgatttgctctggcgtgaatttcccttcaggggatgactggcatccggacattgccagtgatgccagtaacaacggcgcaaaatatcgctttaacatatcgtcttcctttcttaaacgaccccggtttcactgtgcttccgtttgctaccagttgagcaacataattaatttgcttggattccggggtttggtaatccgttatgacataggatgagtcaggattattcggcaggagttgagaggttccgttatacataattttcacgcctgcgccctcagctccggacgaaagcgtatttccaagaagatcattattttttccggttagctttgaggtggtgagtttggttgtgatattttaactattttgtttggggttttggggagaggccattaagagctcttggtacatctttattgatcgtttgtctctctactattgtttattactttagtgcgaagtccaacactcaaacatttgttgaggcactttattttagtattgttacatttaccacgctaggctttggtgatattactcaagaaagcgattttttgcgcttgttttcagcggttgaatcattttccgggttggttcttatggctcggtcacggaaaccttcttcgccttctacgtcgaagacccagcccacatccgctccggttcgtttctcaatctcttgatcagaatcgtaaaattccatattgagttgttgagctaactgacgcccaatagtgcttttgccggcacccataggcccaaccagaaagatattgcgtttctctgccattttttcggtactactaagactattcgttaatggtaatccccgctgcgcagacacccggcgttagcaaaatgtaattaacatcgtatattccctgacacatgtcggtgcgttgcaatgttttcagcataacttttcacaaaatgttctaactcagtcattcttttaaagaaaatcagggattgggatggacgctttgaaatgattgagctatgtttaaaaagtctttgattacagggcgcgtcaacgcaccctgcgggcagtgagggcaggtagcgcttcatttgacaattcgcataactgtgcagattatggaatgggatagttgagtctttatctgaaatatggaattctattgttgaaactactacagaaatatggaattccattgtggagtatttgactggaatatgggatggagtagttgaaacattatcggaagtttggaatagtattagcgaaaccacttccgaagtgtggacagcgattagtgagtttttcgttaatacttggaatggactagttgcctttctaactcctattttacaaggaattgcatatcccagggcattcatgaagctacacaataacaatatgaatcaacgggatataattgatttgttagatcaattattcgaaattgatcgttcaaaacgatcaatcatagttggcgcagttgatggccataatcacgttcctcagattcgaatacgtaacgttctgaaggttaccgccgggggttgtctgcggcctggcgaatatccgcgtattgcttccctcaagttttgccatgctcttgtatatgtgtcgttgagggaatgatagtccggccccaaatgaacgtcaataacgatcagtaatgcttaattgatcgttataatctatttaacgagttgtgtagtgcgttgcggcaggtgatcatgttaaagcaatcgacctataaccgaatgatattaaatgattttaattcaattaatccgtaaccgtagcattaacgcaacatatagacaacaggcatggcaattgatttcatcttaactccagacatttcagagcttgactggtaaggtttttggtatggaatgagatctgacaattcaacaatcctatcgaaaagccaaaaaaaaagcctccactcttacgacttgaagtctggaggaagctgttgttacggagaacaatactatactattgttcttcttttttaacaaaaagtgctatccagcatagggactaggggcgataaggaggtatgttgtgaggttatcccataagtgcttcacctgctagaaattttcaataatcagatttattactcgcgatcggcatggcaggtcagcaaaatgaagattgaatagtagttcaggagaacataatgaacaggatcctggttggtatcattttttctctttttatcactacgggatatatagcatttcttgtttacgatcgtcagcaagagttgcaaaaattgactcactacactgagtcctggtctgtagcccaactggtatctgaatattaccgatttgaatcatggatcgtgaagggtttatcttcacgcgtttttttcagcggctgtagatcagctttagccaacttattcgtaacttttttataatcttttaaggtgagatacccttgctggccgctaaaaatgagcagcgcaaacataatacaaggcgttatccaccgtgacagaaatgagaacctcattttttatccggcctatagcaaagcaaaaataagcagcgtcatactgcgccaatatggaggaaaatagtaatacaggtatggtattgctaagcgtcgcgatcgtcgccagcttcctgaagatctatcttatcggttgattcagaacgaaaaaaacccgctcattgagcgggttttgaaattcttgctgacgcgtctgaattacagagcgattacgttagcagcagaagggcctttggcaccgttagtgatttcgaactctacgcgctgaccttcagccagagttttgaaaccattagactggattgcagagaagtgtacctcagtaatagaatgcggttttcagcccccctagatcgacaaccccgccccctttccaccaacgccttctaaaagacaaaacacactaaaagccagcgctattggtggaaaggcattgtgacccaagcagttgcctcctcaatcgcatagaacacttctgtttgcgctatgcacgagacccggggctggattatcaggtagatatacctttatgcaaagaggattgtgggtttgcctagttgagccgtcttctgtaaacgttcataatcttttttaacaataacggctgcattcactttttctgtcatatctctccattgctcacgtgtcaccacgatgtttcctgttttcttctcagtaatttctggctttccaaacagtttcgttgttacttctgtttttgtttcttctcgcaaataagacattgacactggcttatccggaatttgatttcgaaacgtttcaaattcctgtttcttttcttttatttttcgcgcatggtgtccttccggaagctgatttttttccatttgccgtgcgcatcaataccgccgcaggtgacggagacgtgcacatgcggatgccagttgagacgacgaccataggtatgaattgcgcagaaaatgccgatatccagcccacgcttgctggcggcatacaacaggttatcgactgccaggcggcagaggtcattaagcagccagcggttgacctcaaacaggggccacagcgtgtcgtggctttctggccaggggatgttttacacgtattacgagggtgggttttaaattctcattatcttcagttagttgtattaaatgaacatgttttccatacgtgatcatataagcctgaaaagtataattaaaacatcgtggcttaataaaagtaataaatttgcgttaagggaaggcttttatcatgcacacacagaccatatttgaattaagccaggaagctgaacgtttgttacagctcgctcccgcgaagtaaagcgtgccacggccattttcagcattcagatggtctaatacatccattaacttttggctgtttttcctgggtgcgttgtcgtcaaacagattaagttgcgcgacgccctggctataaaaatctcccagcatcacgccggctttctggtaccgatggccgttcttccagaccgcatccagacaacgaactgatgcgccgataatatcccggctatcctgggttggggtaagcagtgaagctggtcgataaattcggtgcgcgcttcaatgagctgctcggccgaaacgcctgcgtcaaatgcgcttcccagccagcgatggaaaacctccatgtgggctttgatatgcgcgcaggacagttcatgcggtggccagacgcccgggttatcaggctggtcggggagggtgggaagtgctgtgttagcatactgttcgggtaagagattactcatcgtgcgccacccataagaaaaagctatccatgaactgccccatcagccttttattcccccggaatctgaataccagtaccccacggttattgcggcaaagctggccatagccggtgacctggcaacccccctggccagaatgtcagacgaagatcgggcgtttatcaacagccttctggcggaaacccttatccgcagtgaagtactcgcccgcatcagggctcatttccgtaacagacaatcaggagaagatcatgcgggttgaagtgatggagtgtgagacataacaaaactcccgtataatgttctggtcaattgttgaccttcactctgcttttcgctaactgttatgaaggttaaaccttccatcaaggggaaggtcaagggggaaatgtgaatatcagcgatgttgcgaaaaaaaccggtttaaccagcaaagcgattcgcttttatgaggaaaaagggctggtgacgccaccgttgcgcagtgagaacggctaccgcagctatacgcagctaaagcaaatgggacgaaacagtctttacataatggggtatccagtggtttatctacgaaaggaaaaggagtttcccctcttactgggaaaggaattgctgttgcggttttagatactggtattgatagagagcacccagatgtaaagataaaagatggcgtttcatttgttgaaaatgttttagattttgatgatgataatggtcatggaacacatttagcgggtattattggagcgcaaaaaaagatcacgacggcgatttgtgacaagtcaaaaccgtaatgcttcattgcaatgggcgttgccgtcaggcccagaaccattattccaactccggatgcgccggaaaaaagggcgacaagatacgcaggctgagaaactacttttttccacggccttgccggcacttgcccggaaggttcaccaggctggaccggtatctgaaaacgtgacaataacaacaggaccagcgaggccagtatgcccataatgttacggacaccacgcgtagagaacagtattgtggcagattgaatgattttcatctttttattctctttttctaatttgatcattgtctacaccctatccttgatatatttagcgaagttttcggcctttacatactgtataagttcatttgtaattttgtaactcctaatagaaagtcctctatttgtttcttatagaataacatacaccattcttatttctagtatataactataatagaatatgtacatatttattcaagcgttaatgtacatatttaagttagcatttataatctcttatctgttattagttctatgttggttaatatagattcttctgtgtattaagataaacgaaaaaacaacataaaataatagagtttcaaaaaaatagccctccaccagaccatttttggtcagatggagggctatttttttcatgttttgacaagttgcggtgagataagcctgcatttggacagactttgtgaaagagccttatatcacggcgcactaaggcgggtgatgggaggccggggttctgctgggtaaaaagcaggatttcggccttatgcaaaatgcaatgtggtttgttgaatgtttgttaagagcgaggaacgggcattggtcttataggataattgaaccgttctacggatagtctctaaaagtgaatggttcggattacagagatacttgctcttacgcaaccatcagtgttaaaactctagccccagtcaatggtgtccgcaaggaaggcctcatagttctgacccagggtaataatcaggcacagaacgaaggcgaagatcggccccagcgggaagaatcctgaccggtacggcaggttattcagatcatgcccctgcttgacgtacccgcgacggaaacggtagtggctgatggcaatgcccagccaggcaatgaagcccgtcataccagaggtgttcagcagccacaggtagaccgtctggatttccgtggtgagatcattgatagcgcttgtgaaattaccaccgttacgaaagaacaaaacgttgatttaggtaaagtcagtaaaacggcattcaacggtgtaggcagcacctccgcaccaacgcaattcactatcagcctggagaaatgcccgccaacctataccaaggcatcggttcgatttgacggtactgaagctggcaatggcgatctggcgataggtaacccggaaaaaacaggcaccttccagctcgttttcacgacgcaggataactttgtggcccatctcttcggcaaccagctgtgcggtttcctggtcgatgacctggttaatggtggccattgcgcccagtttcatcatcgctttgatgacctgagagcctttcaccgccattttgttagccagttcgccaacggtgatagtttcgccgatcacaacgtcacggttaacggcctgagcaggcttctggaagccctgctggagagcctccatttatcattactttcgctttccttaaatgaagttcacatgatcaccctcatatctatcgaccaacatttattcaataggttttataatcacaggtgtattcagctctaaactgtataatgtaagctactgtaccaacaaaaatttagtaagtttttttagttatttaacttgcccatgcaatgaatagtagcttcaaatgaaaatatcacaaaacatctaattaaaatagcaacgaatacattgtcgaatcccgcgagaagagcgatgctttcctctatgacttccgtaaaacactttctgatttgatcgaaacgcagcactatgaaacgattgcccgaatcgcacatgaaaataagctgacaacttatggtgagtctctggagtttggacgacggttctgggagacgatctcgacatgcgtcggtatgcggacattcctatggctgctatctggtctgtcccctcaggaaaagaagcgacacccgatggcggttatgtgcggtattaccggtgcgctggcggcgttctaccacgattctctggacgtgaataacccacgtcaccgtgatatcgcggcgttccgtctgctctccaaaatgcctaccatggcggcgatgtgttacaaatactctatcggtcagccgtttgtgtatccacgcaacgacctctcctacgcgggtaacttcctgcgcctgatgttctccacgccatgcgaagagtatgaagctggttccactggacttactggctccactgggactaccggggctactggggctaccggggctaccggttccactggacttactggctctactggttccactgggactaccggggctactggagctaccggttccactggacctaccggggctaccggttccactggacctaccggggctactggagctactggttccactggacttactggctccactgggactaccggggctactggggctacatgaaatatcagtgaaacaacagcaaatcagcgtttttgcagtccgaattattcaaacctgtatatcactaataactgtcctgataacttcggtcaataccatcacactgttacataactatttgtcaggtgaaagagagacctcataacttttgcgcattatatgccttttctgatgacgtttgtaacaatattgtttaacatttgtcaaatcagatgattaaaatttaaaaagatgttgttatacaaccgttttgtggtcaacctccagcaaaccggttgtcacctggtgattgtcgccggaaatcatgactcggtggcgacgctgaatgaatcccgcgatattctggcgttcctcaataccaccgtggtggccagcgccgggcacgcgccgcagatcctgaaaaaacgcgacggcacgccgggcgcggtgctgtgcccaatcccgtttttacgcccgcgagatatcgtgcaaagccaggcgggtgcgatcgatttatcaacggacggcagcgcctggaaaacggttgtaaacggcaagtttgacggaaagaccacgacggaatatcagcgtgaccaccgtatcgaactgccaaaatccacgtccggctggtctgtcagggtcaggcgtattacggctgatgccagcggatcaaattcgcaactggttaacgccttcaaggtgttttcctatgcggaagtcatcgacagcaagcttcgatatcctttgtgaaggcgataacattattacgatagaaaaaattaataatggtcttccttatatcactaatactgatgcttttcaacgatggaatgaaaaaggtaaacataaattcggtttttatagtccggaaactgacaatgaaaatatgtctcctgaacgtttgaaaactttaatggaattagaaatgacgaagcgtgtaaatgcgtctgtttcttatgaggtaaaagcggcatccataggacgtgtatgttccttgcggatttgccgcataccaatgcttcgaccaattagcaggattttgtttcccactgaagcgggtgtgaatactaaccaaagcgaatcaccttcgcaagggcattttcgaggcattgtatcaactgcggaaaaaaacagcaaaaagccattaattgtttaaaacaaaggcggcaaacgccgcctttttaaacacttattctgaaagattatgcagctttgactgcatccgcaatgctagcctgaagtaaagcgcttgctctaagagctatggtacccacactaccgtaatcgcgtttcattgttgtcccctcaagatggaatccttgcacattgatggcgtagaagctcacgctattgtacacaataagcaatagcgtacaacatataatggtacgacattaaattattgtacattaacccatacctatcacgtagatcaaaaagacaactgaggctgtactcaaagaaaaaaccgtgaaagaaaaataccataatgaaaaatatagggtttgagcatcaccccggcatccggggcaaagttccagtcgcgccagataagcatgtcgtcggtatcgcggataaccagacgaaaatggatgccctggtcatcttctatagaaatattgatgtatgcggcggctatagcttcagcctgagcgcgggtgaacgtcccttgtggcaacgagggaacctgatgatttctcatgatttccgttgcctatacgccagcttcacgacctgctttacgcagttcagtcattttgtctacagtaacgccacgggaatccgcaactactgcagacagcgcgcctttggctacttcgctgacttcagcaacaatcgcttgtttgtcttgaagatttaaagccattagctttgctcctggatgtttgccggaactcatgttccggaactcgcttcactcgacccaacgggaagagcgtcttaatacggtgagcagaaaatggtcaaatctcaaccaatcctgagatatatcttgcgggggatcccggcgattgcagtggcggttctgctttcggcatgtagtacgacgaataccgcgaagaatatgcatcctgagacgcgtgttgtgggaatggaagattcctcttcactgcaagcctctcaggatgaatttgaaaatatggtacgtaatctcgacgttaagtcgcgtattatggatcagtatgctgactggaaagggcggataaccatatccaggccaataacgtcaccgttgtcgccggggatataaaaaacgccacctttagtgcagacaaaaccagtattggctctgacggtaaggatactgtcaaattcacaaccagcctggaagatacctggggtaacccggtcacaggaaaaacggttttgatcgaaggcgctgactcgttgtcgggctttgcgctcagtgaggttcaggaccagcagaatggacgctatgctgaccgccggacaacgcgccaggtttacgctggaggtaatcgcgcaagcccaggatctgtgccgcccaggtaacgcgttcttcaatgacggagggcgcaattttttgcattttcaggccaaacgccatgttgtcgtagaccgtcatatgcggatagagcgcatagttctggaagaccatcgcgatatcacgggactttgcgggaacatcattcatgcaaaccccgtcaataatcagttcactgtcctcgtagtttgcgctctggttgtagttaaaccctgcgctaaacgtacccgcaattcctgtcgcaaaacttacgttgccgctgtaagtattatcattaggctgaaattcatcatccagcgcatcggcaagctcgcggtaaccgctgctaaaatgcgttgcgctggcggaaaggctcacgtgttcacccagcgttaaatcgctttgcagctcggttttgagcccgctattactgtcgcaaaaactagttttaacaacaaaaaaataattgtggtacaaatatatgaagaagaatgcgaataatggatggtttaataagctcttttcagtctggacaaacctgcaatatatccaacgcttatgtaggaatgactgataaaagaacaacagcgattacaagatcgaattataaggaaaaaaagaatgaattgaactacccccactttcacttcgtttagaagtgagggattcctaagtaaacagcattctttgctccttgaaagattaaaagagtcgggtctcttgtatcccggcattatccatcatataacgccaaaaagtaagcgatgacaaacacgtaaagtgtaagcagtcacggcatcacattctgttaaacgtaagtttagccgatatacacaaactcaacctgactttatcgttatcgatagcgcagtgagcaagacgccataacgttaccgctatggcgtctgcttgtgctttcaatcagttggatatcgcacccctaccgatgaacgcgggctggcatgggcatttagctttccagttctgaatcaggaatgcctgggcagggtagttatgtcacgctacgaacaataagttgcgaggcaattttacgggctgtgaaagaagataattatcaaacggccaataatatcgctgcccctaaagtttttgcgaaaaaaaagaaagtgctaacgttctaatgatcatatttctctggggggacaggacgttcatccaatagttgtcttcgggagtgggaaatgaagccttttttgcgctggtgtttcgttgcgacagctttaacgctggcaggatgcagcaactctgcctggcgtaagagcgaagtcctcgcagtgccattgcaaccgactttgcagcaggaagtcattctggcacgcatggaacaaatacttgccagtcgggctttaaccgatgacgaacgcgcacagcttttatattatgataaaaattgaccaataggttttctattgctcgcaaccagatgcatgctggtaaagccaacagttgtcgtctttactcattctaaacggtcatgtcaataatatagatgctctgcattatctaactttggggttaaaacataacgcatttttctcaaaatatagttatcatttctgagcttaatttgacactcacaaaaagaagcacataaaactaaggccatctgaaatgtttttataatgcctgatttagcaatttgaacccaagctcctgaagcatatgtggtaatagatcgtttggctgaattcttctctgtttccgtaataacatatggtacgattcttccatcacgtacttcttttagaacaagattttgttgttgtaatgtagctgaatgtgtagttccatcaaaaacagtgaaatccaacatatcaacattgtttttcagttcccaatgccttttgtcatcccaatttattttagtgaaggacgcaggatagctaacacgtgtacgctgaacaagtccgatcagttcgcactaaaccaacttaaccagcgtaacggccacggataacgatgacgagcatcctgctgtgtcgcctgagctatacgttcctgaatggtctgcatcagggttgtctggccttcgccgtcccagaccaggtttgtcagtaagggtagtgcatcctcaaccccttcgatggcccagacggttgtgttgaataagtttgttccccgattttatgtgtttcaatcgttccaatctctaataccttttcaattgcttctcttgtcatagtcatttttatttccccttttcttaattagatttacttttcatataatcgattactactgtttgcttctcagcagcctgattttgttctttttcttctacttcttctacttcttctacaggttgtccaacatctgttttcacatcaccctgtagatcctcgagctcaggcgtttcatgttcgcttaataaaaaagagggctgtaagatgtcaaaattccaccctctggcacatctgtactcagagggtgtcagccccatcatttttttaaaggctctggaaaatccttgactgctctggtaatggaataaatacgcaatatccgtcaccggaatcgacgtcattctcagcataatggcggcacggcttaacctccgtcggagaatatattcacctaatactgctccagtaactgcgggtaatgcttccattatcagacaagcccctgtctctattttttttagaaagtcattaagcaaagcgttttatgaagctaaaaaacaatgtatcgcaacacacggtgccgcggaagcaatcaatagcacgcagtatttaagttatttgcttgtgcatatgattaacggtagcaataaagattttgttttttctccgcacgttatgccgcttcagccacgcccgctatcgcgtaccccaaaataatgcccggaccggccgactggataaccgatgcactgcccagaaacaggccagtaccaatagcaccgcccagggcgatgagctgtatatggcggtttttaaggccgcgctttagctgatcgccatgctgttgagcttccatttgaaacctcgtgtgtggttgttatgttcacgctgtgcgtgtgtaattatgaaagtccatattctgtatttattttaaaaaaacaaacgattcttcctcgacagcttgttgaaagaatcgtttgtttttttatagatcttgttgaaaatttcattatatacctataaagacagcaaaaggtcatgtaatggaagttaattccagtctatgacctatttttacacgtatctcggctgaaccccttttcgatacgacaataacttgtttgccataccattttgctttgtattctaacatggatcgaaattgcgaccgtcggaaatgcagtaacttcctcatcgaaacgcgcttacagaaagggtaatccccttagtgaagctgagcgacagaaaattgcttcggctaaaaaaagggctacgcataaagaactgaaagtatttattaagcccgaaatcaaagagtatctttctaacctttgtgaagaagatggtgttactcaagctgaagtgttagaaaagttgattgaaagggaagcttttagtcgaaaagcatgtaatctttacagagatccctgcatgaatatctatactggagcctactatctcgcaattgcatttaaacgttggggatattcctggcgggctgtcggcgcttataatgctggctttcgtgaaacggagacacaggaaaggaaacgccagaagtacgcgcaagaaattcaggcaattaatattggcatcaagaaaaatgcgccaccagagtgacgcatttactatcaatcaatcgcgcgtgtgttctggagcatgcaaaaaaatcatttaatttcatcgcgctggtgtcaacctgaataatcagcgttaaactattcataccatttataaagggagaagtgatgatgcgcgtactggttgttgaggataacgcattgctacgtcatcacctgaaagttcaacttcaggagatgggtcatcaggtggacgatgctgaagacgcaaaagaggccgattattatctcaatgaacacctgctgcgttgtatcggctcaaggattgtacaacgtactggcgggtagttaccaggctcaagcccgaacagcattagaaattttgccatcccttgaagctgaaagagttgccggactctctaaacacatcacttgaaccattagcgatacgttccgcgcttcgtgcggcgctcaatgatgctacaccttgtgaaaggtcacagagaataaacaggcgtaatgttgggaagactaaccggatcacaacgcggtagcgagaagaacttttttcatttgttaatccttaacattattgattcacggaaacccaacccaatcttttattcatgtaaagaatgggttgtatattccgcacttactaattgaatggcgtaccattcgtgataaaacaatcctgcaacgcttaaagataacgttattacgatatcatcaccacattgcctatggattattttgcaatattttccagcttaaatcgctagatcttcttcccgatggcggccctgctgggggcgttgctgggcctggggatgctggctcagcgtagcgagctggtggtgatgcaggcatctggctttacccgtatgcaggttgcgctgtcggtaatgaaaaccgcgatcccgctggtgctgttgaccatggcgattggcgaatgggtcgcgccgcagggcgaacagatggcgcgtaactaccgtgctcaggctatgtacggtggttcagtaccgtttcaacaccggcacggcgcgccatttcttctgttcgatttgcggtatttacacgttccaccaacgacgttccaatcccaatgaatatggtgtgaatgtcgcctgtctggaaaatgtcacgccattcgacttcccggaagtggcggtaatggatggagtaaatcaccctatggatggcgacagcgggggatttggctatctctctttccgtaaagaacagacgaaacagcgaaataactaaagcaatgttaatgttgactagatagagctcaatcgtaatatgaaggaagtgacccatgaatcaaagtcccccgtctctgtgcgagatgctttatggcaattttgtcggtggtctcgaccttcagcaggtcagtgaagaaaatcaggtcattttgtcggttctggacaacatgcaacggatccttaactgccgtgccggtactctggcacatctgccagactatggtcttagtaaaaagagaattaattgcaattgaatttcgtacgatcatagttaacggaacgaggcataacaacgttatgtatgtggaaccaattgtgaagaacatcgaaaaaatttctattttatatcaagaacctatcacatcagaaagtgacaccctcccacattctaatgagagaggctcccacactaaaacggaggaggctcctacattgaaacgtgggacaaatacaaagattactacgacgttatctatattgtattcttctgaacgttctcgctgacgtttattgacactcctttaaatttatttaacttatatttttaaaaaacgtcgcctcaaatttattgaacgaagcgattgaaatacattgcggaaacacattcaaattcgctgaaataaattaaataaaatacattattcatttttttcagttgcattatttatttaacccgtccatttttattgctcagtcatttggctgtggtgatgataatgaataaattaccaataaaattttgcatttcttgaagccgtaatatagtgatttatttcgtttttaacatcaaacattacagtttgcaattgtcaaatcaggtaggcgtgttgttagaaagtgaatgttatgaagaacgatgattacctgggcaggtaatcatcgttaaagcaaatattaagcaatcctgcacgcatccgcttcccagcgataccccacgccagtatcttccttctttggtggccgggggagtgaacatgctctctttagcatatcgacgtaaagtattcagacttggaggattactccggtatttttccgcagcccattcttctaaagtcagcatttgaagcatgtgatttacctcataatggcccatattcgggccatattctgaaattaaaaaatcagtgttcagtcagaagctgccagattgctgacacgtatttgacctgatgggcgccaacggcctccacgctgttcggtaacgtgagcgatacgctggccttcttcttcatcgccttctggcgcagcccggacgccttcatggcagaacactggatggaaatcgctctgggggactacgcctttaaggtgcttattagcctggtcttcttcctgccgatgtacggcgtactgttgaatatgctgctgaaaaggctggcagataaatctgaaatctccgcattgcaggcaccccggatgtgcttttggtcgtgaattcacccaactgaacgtatgtgcctacatctccccctttccacacaccggattgacagtttaatcagtagtgcagtttacaatagcctggaaacacgcttctccttttgaattattgggcaaaactatgtagaaacggttgttaaccgggtcgagagccattgaatccggtgagttatgatttgaaccatcagaccaactttttaaagcatgatcagaatgtggaaagaaggcaaaagaagcttcaccttggtcaaagttggttataccatcaagagaagaaataatgaagcgtagaaagctaacttatatagcaaattagtttgaattcataaatctttaattaaggagagatagggaatgaatttccaaattgatgaaaagaatgtagctgctggtcaatgggttgtatgcgaattgaaggataacaaagttattacacaagtgaaccgatttgcagatccatccggtgaaacgcattgaggaagttctgactctcgcactgcaaaatgaaccgtccggaatgcaggttgtaactgcaaaatagtgacctcgcgcaaagagcgccaataaaaacaaggctggtaagtcatttcgtacttgccagcctttttttgtatagctaatttagattgctgattgggttagccatcaacaacgggtgttgtaaggttatagcaggacttaatgttcatgcgtctcgccgcctaaatagagcggaaattgctgataatgatcgcaggttttaatatccgaggcgggctcagcaaatgacaggcttctgtctttgagtgtcgggtgaataatgagagcagtacgccccattcttgcttcacggttgacgtaaacataattctcaccacggcgatatccgtacgcttttgatgttacctcatccatggtgaacccttctttttcaagccgagatcccgacggtgacgatgtctacattttcagtgatggaggtaatactcgttatcagatcctctgcgaactctggcaggaaacgggtgatgaacggtacttccgtgttcacaccattttcaaaccctggcctgggcggctcaaatgtctcgttggtcatctggccgaaaatgaggtcaggggggatcttacctatattgaaaaggcattcggagtccataaagcgcgtgtaaccagataccaatagagcaggccaggaaaccggagaagcggtgatcgatctccagcgctttccggccaatcgacatggcgcggaaagcgacgaagaataccattaatagcgccaataccacaccgatataacccagttcttccccaataatggagaagatgaagtcggtgtgcgcctccggtaaatactccagtttttgcaccgagttgcccaggccttggccccagacttcgccgctcaaacaatttttctccaagagattgtgcgtgatccagcaacatttctaaatcctgttcagtaatcactaccgaattaccttctttatctttcccgccacgatggactaaatgattacgcttttgagttgctatttcgatcgcatctattggccactctttatgtacttttatatcaaatgtagctttataacgtcctacaactttgtttgtactatgccaacttgcactaatcaatgagtttgcttactattctcataattaccattctcgcttagggctaggattgttattactgcgcagggcacatttatcgtatttatgttcgttcaatttattctctggcgtcgataaacaatcttcatcttttttatcgcaagagcatagaatcaatggaatgattagaataaaaataaccaaaattttatctttcattcagctatccctcaccaaattcgcttcgggcttggtgtaagattttaaatttattactaaccacaacgtattcagtgttattttcggccagaagtcattcctcagttgaaggatatctgtgtatggccttctgaaaatatacggattatcaccatgggatggaccctgctttattctataaggtcgcgtcacccattctgctaaaaccctttcggtggcgggtttatatctttataaaagttattgtacctggtacaacaaatcaatatctgttgcgcccgtagctcaattggatagagcgtttgactacggatcaagaggttaggggttcgactcctctcgggcgcgcttttattaacgggaagtggctcagcttggtagagcacctggtttgggaccagggggtcgcaggttcaaatcctgtcttcccgaccacgcgggtgtagtttagtggtaaaacaagagccttccaagctctggtcgagagttcgattctcttcacccgctttttactgtgcccctcaacctacagcatttcaggcatgctcgcgccaaggcttgaagcccgcaagatcccataccagatgattgtctccagcgatgataaaaagcactggtccccgcagaatgattacctctgcgtcatgccgctgcccagcagcaaggggcttgagtttaattcggtcgccattatggatgcggcaaaggaaagagacagtgaagatctgagtgacgatatcaagcgagtcttttactactgcggattatcctgaatccaggtacgatcaggatcgccaatgatgagctgcggaaccagtttattcagttcgtcactatgataaagacgtagacaatttaaggttacgccttttacatcaggtttgcgctccgagtggaaaccattaatttggtttttatacttcccaataatggcgttaactttgtcagtaccgttttcagcatcaaacggtatccattcaaccggtgtaatcggacacttcggttaccggcagacctttctctgctaacaggcgcgcggtgccacctgtagaaagcagctccacaccgcgtgcggaaagtgcctgggcgaattcgaagataccggctttatcagaaaaactgagcagagcgcggcggactggacgacgttgttgcatgataaatcccctggatttcacgattacagagagcgttagatgaattttcctgtgaaaatatttcgtcccttaagcttcactgaacctgcataagaactcaacccttgtagaatgcggcttgccgagccacttcatccgcgatcatcctcattctgatgttttgtgaagtgaatttccgctccacagaagtatctcactaccggcagcatctcatttatcagagcctcaccttttggcgcactcctcgcctcttgacattgaaaaatacctacataaaaaaacatagaacgcaagtaaaaggtacaaaagagactaaaatcacacacacagcaataattactcccataaccaaagcggcaggtactccaaccgctgccacaacagcacccacaatttttaatatacctgcttttagcattttggcagcagctttcgctgccgcccttcctgcttttcctgccaattttgccattttcccgcgcgcttgcatcccttttttcttaataaagtgggaagctacatcttttaaatagtttcattacgaccgttactcgacgaggaagagatattcactcttaacgggtttatgcaatttgcaaaacggctggggttccgagttacaccaccgtctgatattattctttcataggcctgaacaccctatacctgatgcgccacggagagaaccatggcgctagaattacaacttataaaacaccactcaggaatcctgatcccggctacgccggagaccagcgatttcagacgttccgggctgggatagaggtagcagagaattttgccgaccatcatatccagttcggaaagcaccgagcgcggaataagcgtggtagagcgcggacgcaggtagaaaaacccttccggcgcgcggatcagctcaacgttatagcgagcgtaaaactcttccaggtactcctgaaagtccatcaaaaaggcgtgattatccagctcgtcaaggccaatgtgacgaccggcctctttggcctgacgaaactgttccgccagccgtgagcttttttcctccagcagcgcctgctgaataaagaacgcatgggaagttaacgcatggcggtaaattgcgaagccgtaaagcagattcagcatgagcacgatgaacatcaactcatccagccgccagataataccgaggttcagcaccccccaggaggcgaagaaaaaacgcgtgaaggtactaatgacaggcgtgaggaagatgagagcagttttagccagcttcttgaattatataaaaacgtggctgtccgccatgttttcagccacccggatgtcgaacagctggagctgcaaggataccgggttatcagcgggttgctggagatttatggcccgctgctccagctgacggtcgatgagtttagcgagctggcagataatgaacgtgttcgccgcctgccgattgaatctcgtctctatcagaagctttgaagaattcagttcatttgtttaagctaactccagtcgccagatacatttggcacggtaagtggagttctcacctccagttaccgattgaagaacccggtctaatcagccgggttttttcatttccggcaggccgtaaaaatttaaatgtttaaatactacatatagggcttgcaaaaaataattgcgctatatgatgagtattctagtaagtaatcttttcagcacaagggtacgattcgtttcgaagttgtctgaatgtttgtcctctcgcggggattactcctggtttgccttgacagttctgtcgggcaggaggtacaaagcccaacagccaagtttatcgcgatggtcaggcgaccatctgttcagttaacttaaagaagtcattagcgaatgaaaataactatctccggaacaggctatgtcggactctcgaacggtattctgattgcacaaaaccatgaaccatagactatccaggccgagatggtttaacagttcaaccaccacctgcgcctgttcgctcgtgcgataacggtagatgtcaggtttgtcactgtaaccgctaccgggaagatcgatcagaatggctctgcgccccccgaaacgggtatcacagacaatacgaggatattcatacgacgatgcacagcccaacccgtggataaacacaaccgggtcaccgaaaccgggaagatcctctgtgtctggtgctttatgaattctctacctacatcggcaacgacatgatccagcccggcatgctggctgtggttgagcagtacaacgcaggtattgagtgggtacctacatcgatgaccgcctatctcgcgggcggcatgtttttacagtggcttttagggccgctgtcggatcgtattggccgccgcccagtgatgctgacgggcgtggtatggtttatcgtcacctgtcgcatttcattttttaacttatctatttttcctgttccctctgaattaaggacactctgtgtttttgccacatcagtatcaagatttttcaacttcttatctacctgtagttttagatctgttaactcattaatttgacgttgcacactttcttggtttgtgatggtcatgtcttgaaggacttccagtctatctgtaaacccttctttatcttccttattatctacaaatcctttctggttctgggatgtaagaatccaggtagccagccagttcgatgattttctcttcccactctgcttcgccttccagcgctttcagcgcggaaccacgaacgattggagtgtcgtcgcctgggaaatcgtactgagacagcagttcacgaacttccatctctaccagttccagcagctcttcgtcatcaaccatgtcgcacttgttcaggaacacgatgatgtaaggaacgccttcacagtaatgtgaaaaggcgttgggcgcttaccctacgacgatgtagaacgtgttcaccgtatgcataaactattaaaggtacaggtcgaaaagttatatgattttgttcaaaccggagctgcttcacgtgaccaaaaaaacgaatataagattataaaaggaattgacgagtggtttggtgcgacacgtttctctataaatagttaataactatgaaatgagaagactatcttctaaattaaactttatttattattaacgacgaaaatgcaactttcgttaattttaataaaaagagtgtagttgcttatcattggcggtaactccttaatattgcaataagacttataaatatagtggatttgggttaagatgtgtttcgggaatgcagcatagcgataggcctgttacgtatatcggcttctgcttttctgtattaatcgattgttattgttaaagttatctcgatattatcaagtaacatttcgtttacaacgccatccggcgccgcatcatcttcagacttattcagctttttatccttaatataaaagatattgcttccatcgactttttccacgctgagcgtgtaatttcggtcaatcaggtagcttttgccctctttcttgagcacgcctttatgattaaccgtcacaacatctttgttgttaaacaggaaaagcgtggttagcgacatatcctgctggcgattgttgccggtacgctggtggcaggcctgtcttacgcggtgctgaaacgtccggaagcggaagttgtggcgaaagcagcgtaagcggtaagcaataaaaaagccgggtgctaatgcaacccggctttttttatgccgcctgttcagcggtttgctgtgccttcagccaggcaatctcttctgcccagatgtccggattgatggtttccagcaccatcggaatactttcagccaccgttctatcagtttttatcgatgataacattcgtaaattgttattccccgtcagcaacttcacacccgcactgacaccagacgacaaactccttacaaaacatttatcaaagctaaattttcattaaaaatagaagctatcataatttacagaaagcgaagcggaataagaccaatcagagttaatcgtcgtaaccggtctcgatcttagtaattaatacaatttcacagtaatgtgaaaaggcgttgggcgcttaccctacgacgatgtagaacgtgtacaccgtatgcacaaactattaaaagtacaggtagaaaaattatatgattttgttcaaagtggtgttgcttcacgtgatcaaaaaaacgaatataagattataaaaggtatcgatgaatggttcggtgcgacacgtttctctataaatagttaataactatgaaatgagaagactatctcattttgcatgaaaagaatcattgatttttgtaaatctgctactgttaatttagtcgttaagtcatataatttctgattttgtttctctaaatcatttaaatatgcacgttgctctgctgttagtttattaatttcagcaaaagtattatatgtttttttaattttttcaggatcaattactttcataagatcatactctttcgtttttgtaactgcagctgcagcgatttcacttttcagaaccgtgctgaggaatgccaggaacagaccggattacttaagacgacgcataacggaaatgctgaatgatcccgacctcgatttttcattaatggatataaattggcgggtaaatttcccgctcgacagtgagctaaaagcagtgttactggaattcgttcgctgatgccagtacacatagatcattacctggcaccagacagtttaaaaaacactcaaatatttgtttatcccctacggtactaacacccagattaggattgaaccgagatgtagcataacatctaccgcctgttaatgacataagacatctagactttagtatattgctaaaattatcctctccattcgagaagtggtataagtgagttgccttttgagataaccgcatcttcaaaaacaacacaacaaaaataaaaaaagcaccaaatggaattagtaaaactgtaaaaacccctgatcaccaccattactacaaccatcatcattaccacaggtaacgatgcgggctgacgcgtacaggaaaaacagaaaaaagcccgcacctgaacagtgcgggcttttttttcggctaaaggaaatgaggtagaaccatgcgagtgttgaagttcggcggtacgtcagtggcaaatgcagaacgttttctgcgtgttgccgatatcctggaaagcaacgccaggcaggggcaggttccacttccgttaacaggtgcggaatgccttcgtagacagacagttcaagcattttcgggtcgatcatgatgaaacgcacatcttcaggctgcgctttgtagagcatactgaggatcatggcgttcaccccgactgatttaccggagccggtggtacccgcaaccagcagatgcggcatcttcgcgagatcggcaaccaccggatcgccggcgatatctttacccagcaccacgaactatctccatgtttatttcctgcctgaagaaactgtccggttatggtggagcactggatttaatcatccggactctcacgatattaatgaccaaactacagaattaaaaaaaggaaaataacatatggatatcgaaagtctcatcgccgcggcaaaccgggcccagcaggcggaagatgctgatttaggtaactgttcacggatatggcatgtgggcttcttttttgttggcgtacccagggcgttttgagctttcgtaattcgttgtaaaaaagtgagccagagcagcattttgtggataaattaccaccatatggcctgacctgaatcaattcagctggaagggattgatatactatttgcagtattcgacggttgaacagtttcttccggcagcagatttcaattttgcattcctaagttcagaggtagtcatgattaagaaaatcggtgtgttgacaagcctgataaaacccttccgagcgccccgtcgaacggcctttactccattcgctgtgatgttttaccaccagacggttcaccacatttttcaccagcggatcacgtaccgccagcgcctgcctgatttcctctgccgtcagtttcccgtcatggttgctgtccatctctgccatcagtccgcgataaaacggcggcacctggctgtactgataatcagccccctgctccgctgacctgagagcgacgcgtcgttcctgcatctacagccgacggtggcgatcgtcaccaacatcgaagctgaccatatggacacttaccagggtgacttcgagaacttaaagcagacctttattaacttcctgcacaacctgccgttctatggccgtgcggtgatgtgcgtggacgatccggttattcgcgaactgctgccgcgtgtcgggcgtcaaattacgacctacggcttcagcgagtttgctgtccttgaactagtgtctcccgttggaccagtagctcctgttagtccagttggtcccgttactccggttggtcctgtatctccggttagtcccgtatctccgattggtcccgttactccggttggtcctgttactccggttggtcctgttactccgatcggtcctgttagtccggttggtcctgttactccggttagtcccgttactcctgttggtcccgtatcttttaatttttagtgacagcgttttggcaatttggccgggttcaacgttgtgcgcggcagcagcaagggcaacagtcgctgtgctttggttaagctcaatgatctctatatccggagcgtgttcggcaaaaaactgttgtacagactgcaaactcattgattcctcctgacaaatatcctgcgtaatctgtcataagaatttagtcgctgtaaatatcccttaagtaacaactatacaaagtagagcatgccaatcatggacgggttggccagcgtttcgaaatcctgagcccagagggcgttcagtagttgggtcaaaagttccattcagtgttcctggaaatcggttaacgtcacgcctgtaattcgggaaatacagcacggcgacattgttatgatttcattatggtcgctcgcggacacattgatgtgtggccaacactgttccctgttaattggctggttctcgttcacgcgacggatcacgcgctcaacgatgcggtgtttttcgctggaggtcaggcgcgcggtgcgcatgtcttccggaatatccagcggcagatagagagacggcagcaccagctgaacggcctcatcccacgggttatccgtaccgtggccgtaccagatattggcggcgctgaagcggctaaccgaccagcgcaacatgtcctgtatggtatgcagctcgtttactcgaagccagtcatcaagtacctcattcccacaatcgaacggttcaagaacatgctgttctgtcagtaaagcaggcgcagtgacatttatttccattcaggtttcacatccatcagccgctgacgaccttcaacattctgtacaggcgcttccagctgcttaatgaatgcctggtaacgggcgtcatcaagaacgaacacgcgttgatccaggattatgttctgcgcctcgtgagagccgttgcggccaagcgtggagacgataatgccgtcgcgggcgagaggaaccattaatttgcggataaagctcggattcgcttccaggccgtaagccaggattgcactcgtcgaacgttcacccgattgctccgccatcgctacgctgagaaccatctgcaaagctgtcgggaagcggtaatctaacatttttctgtcctgggttgcggtgaatcttgttctttttggccagccaggtgctggcgaaacgtatgaagggcgatctctccgagtattctgttattcagactaaagagcctctggagacagaagggcaggtgagccggatcgttgagtttatcgaaaaacccgatcagccgcagaccctggactccgacctgatggcagtcggccgttatgtgctgaatgcggatatctgggctgagctggaaaaaaccgagccgggtgcctgggatcgtatagggcgatgatcgatgaaatcgggtcaatcgataaaccgcttgcgcaccctttccagcggggcaatcagcagattgataagcggcttacgatcgataacgatatcggcgttcaccgtcatcccgcccatcagcatgcgctttttcttgtccgggtcggtaaaccaggaggggacgcgcactttagccaggtagtagttctgcccttcctggagcgggatcagcgccgaatggccaacgctcatattacctggctgggacgcgccccaggagaaggaggtaatatcagtccagccggtgtggttagaatctttagattcgcccgtaacaccctcgaccttcagaaacatatcaatagccataatatctactcttcgtggatgaacaatattgctttcgaaaaagcccttatatggcaaacaggaaagcatggggctgaataaaaccgtccatattttacctctaagtacaacagttcacatagctactatgacatcggttcccaagatttttgcacgtcccaatatggtaacgaaaacgatcgtgacgacagctggcgcggtgtagaatcacctggagatggcacatggcggataaacgtcaaagacgcaagtgaaacagctatgtgctttgactggcaattcaatcaaggcagctaacccagcaggtttgtgtggagctaccattatatcccaaggtagccgtatcggaaggtgcggctggatcacctcctttctatggagaattgatgaacgctgttcatcaataaagtttccgtgtttcgttttgttcagttttgagagaactatctctcatatataaatgtatgttctttgaaaactagataacagtgtagctcatattttttaatttttagtttggttaagttagaaagggcgcacggtggatgccttgacactaggagtatggatatcgcgatatttaggtatctgtcggtgggcgtagatatcgataacattctttatcgtcagagcatattgttcaacgttaccaatctgctttttattaaatatatagccgttttcttccatttctttcatggccagttctacgatacgccggctcagctttggtagttttgcgacagcgttacgagtatatgtctgatgataatcagtcagattaaattctttcctttggttataaggacagggggggagcatcgcattagtaactttttgctgtggcaaattgcctacgccgaactttactttacggatgttctttggccagattttgatgaacaagactttgaaggtgcgctgcatgcctttgccaatcgagagcgtcgtttcggcggcaccgagcctggtggcgataacgcctgatgggggtagcttttgctgaagtatcgcctgatttccgtctgacctatgccgaggtcaatgaccatctgccggaagatatcgtcgattcagatcagatcgaagatatcatccaaatgatcaatgacatgggcattcaggtgatggaagaagcaccggatgccgatgatctgttgctggctgaaacctccaacaacactgacgaagatgcggaagaagctgctgcacaggtcctgtccagcgtggaatctgaaatcgggcgtaccactggggggtttcaggggcagtaacagtaaacctaacgcaaaaagttttaccgttactacatatttcttttacttctttccaacatctgccgttccacgctttcacccggcacgcctcatttgtctctgcgacggtgtttgtctgccgcttgacttattttgtgataaaggtacttttcaggacatgaagaagatcctgattatcgtacctgacggtggcatgttgtttgaggctgccacgctttacgcgcgcccgctttatcacccttactcagcagtgcttcaccgcgaagatcggcaacaatagcggcaaagccttcgcctttgatggtatcaagcgttttgagcgcgtcgtcggcttttttctgctgaacctggatacgcgccagacgcagattgatcaccgctttcagattatcgtcactggcagcagcaagcccctgagacagttgcgcagcggctttgatatttgattgattatacattttccattacctcttctccatattgagcaaaccgcaaaagcgtatcattgccagacggcatagataatgttggagtcagcgacactcccaacaagctttcgatattaaggaacatttcatttctggataattcatcaatcggtatatcatttttattttctgccatctgctccctgaatgaatcaacgttatacatatgctcagtaaattcggcaatcgctttagctttcgcttcagcttccgctttgtccatcaggtcgatcttgttgaataccagccagcgcggtttttgcgccagtttttcactgtatttctccagctcgccgataatgatacgagcgttttcaaccggatcggaaccgtcgattggatcgatgtcgatgaggtgcaacagtacgcggcaacgctcaaggtgcttcaggaagcgaatacccagaccatcgttgctttgtatttatacgccatacatcccccaggctgttcctgatttctctgcatttgcctgctggtttaccttcctgctccggaagttcccccatcaccatcgcacaactaatttaccttaatttgataataattaaaaaattaaaagtaccctaaattcaataattttagggcatttattacatttgtttaaatttaaaagtgacctataaaagtaggttacttcggaagtccggcgcgctttatatcacaaaacacggccagaaaccaataattgttggcggagtgtgctgttaatgattctcaatttggcacggggtgcgcctgactgataccattgacaacacttacactagtattgtcgaaaaaatcgacaccgatggacagattacatggctatctctattaagacacctgaagaaattgaaaagatgcgcgtcgccggtcgtctggcccagcggcccacgctgacctgacttggtctcgttgtatcaatatactcgtaggtcgtcttgtaaccggccccgtccaccatcagcgcctgagtggccagggcgggcagcgctttggggtaaataaagagaaacttccattcatcgaaaggcagttttttgtagccccactcggtctcacccggggcagaagccggagatttttctgcggtacacccggccaccgacataaaataccgccatcctgtttgctgacttgagctaagtatggcgcacgatcagttgatcgtcaataacgatcaattgtaaagtattgatcgtcattgactatgttagaggttatccagttcatgtttacacatattgattacaacttattaatatatgaatgtttttatcttaaaaaacagcatgttggaattaatgtaatgataacaataattcaatccgctatactcagtaaatggcgctcatgggatctttttgcagcgagacggagatcagcggcgccacgacgatcagcaggatcgcaaacagcgcggtcaatgccgctgcgcgtttccagctatgctgatgcagtacgttaaccacttaccctccacccaagaggcgaacattgtaaatgatttatgacggaagggttaacgcgagaggtgcgatgggataaaaaaagggccagcctttcggccagccgaaatttcataatacctatagtggagcgcctcaaggtggaatcattagtccaatactttctaatatttatctaaatgaattagatgtttatatgaaaaagtatcaggatagatttgaatcagggaaaaagcgacaaattaataaagagtatagtaatttacagtataaagtacgaaagattcaagagaaaatcgatactgcctatctaaatggagaagtaacacgaattatcaacgtctttatttataagcacaggcgcaatctggctcatggggcgtcgcgttctccatgctaaaaagtttcttgtattttatttagatagcgtaaacaaaagcatctggcaatttttgataacgcttcaaatattattaagcgtagttaacagttattttagcgcgtgtaaacaatcgagttttaacctctctggaattattacctacgccatctacacttactttacgcccattaccactaatgccagagtgctctttttcattttcaatcctgattttataaaaacgcgctaatattcgctgagtaataagattcggcttattaccccgtgaaaaacaggaagggttttatcgttcgtgggtgaaagttttatgacaaagtaaaaatatgtctaaaaaagtatgttttaatttttcggtaataaaattgtcaaaatctgccgctacgcttcctgatgaaatttcataatacctatagtggagcgcctcaaggtggaatcattagtccaataatttcttatatttatctaaatgaattagatacttatatgaaaaagtatcaggatagatttgaatcagggaaaaagcgacaaataaataaagagtatagtaatttacagtataaagtgcggaagattcaagagaaaatcgatactgcctatctaaatggagaagtaacacgaattaaagattcatcaccggcaattacacgtgcttccaggtataacttaggtgtgaagcccgtatctttaattcggatcgtatcgccctcgttaatgagttcatgtgctagtccgaaaatacgtccaatcgattgtgcctctacttcatacgaaacggaagaattgacacgcttttttaattctatttccattaacgtcattaaacgttgtggcgtcatatttaactcttctgtttattaccaagattgtccgcgaaatgctggaagcccatctggttcaggagacagaaattcaggagccgggcagtcgtggccgtccggcggtagggctggtggtggaaacggaagcctggcactacctgtcgctgcggattagccgcggggaaatcttcctcgcgctgcgcgacctcagcagcaagctggtggtggaagaccggctggaactcccgctcgatgcagagcaagaaaagataaaaaaagtattgcaattgaaaacccttgcctcatggcatttgttaataattcaataccaataaatgaagagaagagcgttattattatcagtttatcaagcttaaataccagcgttgtaatgaaaataatgctaataacaaaatacggccatagccaaattatccaattcacttcacatctttcggccattaaaaaattcaaaaggttaaagattattttaggacccacatcgttctggtaccagttcacgtccagctgcggctctgcaccgtaggtgctgtttgtttgcgtatcaaatacctggaactgtttggtcgacaccgtcgcgtcaaagttctcaatggcgtagcccacgctgaatttctgcgtggcgtaaccgtcggtactggagccgtatttagaatcaaagtcgttgaagtaatacggatcgctgactttggtgtagtcgcataaattttacctcttgtctttccgtcttggtgattccagcatacccgacccaatgtcaaaatgtgtgatttagatcacgttattttgtcggtttttgtcagggaatcttttttgtgaggcagggcaggaagaggtgagatttaccttgtcgaagccaacaattgcggtcatagttgaatggatgtgttgaagctaaaccgcttcagcgtaagtctgaaagaataaaacgccgatttcgttgttgacgtgcatgatggagaccagaatggtgtcatcacgcatcgccgcttcgagctctttcagatcgataatgccgttgctctgtggcgccagataggtgacttcgaacccttcacgctccagctgacggcaggtgtccagcacggctttgtgttcggttttgctggtgatgatgtgcttgccttttttctgataaaagttggctgcacccttaatgggcactgccaaagtggtgtccattgatgaaaaaccgaatttccgcactcacgtggttgagctgcctgaatatatgctcgacggcattgaaaccggggcgtcgatagcgcataacggctgctgcctgacggtgaccgaaattaacggtaatcagattagctttgatttaatgaaagagacgctgcgcatcactaacctgggtgagctggtggtaggagatatcatcaacagaaattaatgaattaaataccttacagaagtcgttacaacaacttcaagggcgtaagcaccgaagggcgaagcccgaagggatttcgagcgtagcgaagaaatctagtgaatgaatccaatcgttcaatgatctaataacggtcaatagcgcttcgcgcactcgcttcgctcgtagatttttgaagtgacctttatccttgtaacatggttatcattgttatttttacagtcagattgatgatttgattaccatttttgacggcctttacatcatccaggtatttatccaggctgtagtaatcgccagctattgcaaagccagctttttcctgaaaacgattaaccttaggtacagcagagaaatccagctgtgtgatatgaggtatattttcttcttgccccatcatgccggatagtcctgtgatagcaacatctttaggttcggccaggaaggtaaggtcgcggaagaacttcgcgccacccataccggcgagcggatcgtggcgcgctttgaggatgaagatgaagaataaccggcttacactgccgcgataatcttgatctcaaccttatattccggtttcatcagcgtggcctgtacggtgcagcgtacaggcgcgtgacccgccaccacccacgcatcccatgctttattcatcgccgcgaaatcgtctttattcgccagaagagacatcgcggatagacggctgacgcagcgaggtcaggttacgcacctccagaatcacttcgcctggcttgttttctttatccgggaagcgctggttcagagaacggccaaccatcatggcgatgatcttgtccatgtccagcccttccagcggctgggtggcaatccactgaccgtcgcgcaggatggtgatttcatcgcacagctggaagatctcttccatttggaaaaatctggccttcgacactgcaaaaaatgcggccaaaaaagtcagtatcgaagccaccccctggctgcgcgataaccccacaatagcggatatgctggtgactggcgccgatacccgtattgtatcgaccaaaataacgtttgaagagggatacaaagaagccgttaaaaaaagcccggtccccgttaaactcatttctgtctcccttttcggttttgacctcggctttcattttcgcctctctggccttattcagtgcttttataaccatgtcacgttgagcacaggcgggaaaatgctggctggatggcattttctgccacgcggctaacactacggtgacaacaggtttatccgtgatgtgttgccattcttcatgatttagccgtatggcactgtctctggcattgattactgttgaagcgggaatgtgcatctgctgccattcgtttttcctaaatgaattacggcagctttctaatcaagaggatataagagctgactatcttgttgtcgcgggtgacatcaccaatagagcaaccagagaagaatttgaacttgcatccacacgcttgaaagaaattgcggagattgtgggagtagagcaagaaaaagtcttctttgttccagggaaccacgatggtaactgggctgaagaagaacgctcaatgacctcaaaacgggcttcgtctggaaaatcagtcgattagttgttaaccgggatgactgcgcctttgtatttggtgcggatccagtcctgaatctctttggagtgcagcacgttcaccagcgcgacgatatccttcttcttctcgtcaccgcgatgaacggtaatgatgttggcgtacgggttattctcaccgctttcaaccgcaattggatcgtggaccggatccaggccagcatcaaccacgccgtccagcgccatcacgcggccaaaagcggcgttttcgaatattatcaaatcctgatgatcggttttctcatgatagagcacgttatccacggcaaaatactgaccaaaatggtcgtgcagcgtttcttgccataccgttttttcggtcatggggagcacctccttcgtgaacatccattacatccggcagatgggcgcaacacaacaccaccgtgaggcgatttctgcctaacgagcaggattttctatacctaaaccagctgtaccctcactttgttctggatataatcagggtaaaaaccaacctgggcaagagagcatcatgatgtttgataaggaaaatttactgtcagtcaggaaatatattagcgaactggaggcacagggcactgcttccccaacggatttttatattcgggaatttgctacggaacctggcttattgaccgttctaacaccattcttgctgtttcttggattatcctatctatcatggctgggattcctagagggcgctttttaccattgcccttgtcaatgtaatgccttcgaacgggtttaggtttgtagttgtctatgtgtccccagatgagtttgataagctgttccgtttccatttgtaggtagtagttcacgtctttcttgtcaattccgaccgttttactcccacgattgcatgttccagagtcttcgaaaaaatcagtggaagaagcgattaggggcgttagtacgtatggtattgatgctgaagaggcattagaaggagttcgccgacagtgggcattaaataaagatgcttctgacgaaacaaatgccgctatagttaaaggagcagcgactattgcagcctcctacgctggaattgattttaatgaacttatacaagaaaccaatgagattggtggttctaacaccattcttgctgtttcttggattatcctatctatcatggctgggatccctaaaggacgctttttaccattgcccttgtcaatataataccttcgaacgggtttaggtttgtagttgtctatgtgttcccaaatgagtttgataagctgttccgtttccatttgcaggtagtagttcacgtctttcttgtcaattccgaccgttttactcccacgattgcttgaaacacccactgcacctgtagcgtcatggtttttagtcagaccatcaagcgttgccgcggcaactgtaccggcgctgttttgagtcaagttacctgttgaatcgataaacagtgctgaaccatctttagcagtaattttaccatcactcgccagcacaacatcaacagaagtaccaccaatcttaacgctcaggttagcagtatcccctgctttcggcgtcaggtacgccgatggttaaggtcacgccccgtaccggttttttctttgcaataaccgttttccactcattatgaacactggtcttatgagtggcatcttgtacgtcatacccctgatattgtgtcattccgtctctccgttattttttatcttgccgaactcagcttttaccgatgacggaattgacgtattgaccggcgctgttttgccattttcatcagtaattccctgacgcgaaaaccgatattgatgagtttgttttcaattgcatgattcgtatcagataatgattaatttcatattattacgggatgaatagctaagcaggaacgggtggcaatatttgagtttgttattattttgtagaattacacgttttgaaatatttagttatatggttgattttaatagataaaatgttgattcgggaatagctatgcaataatgacagttaactagggattgcatgtaacatggactctacaaatttttttgtgaaattattaatactcaacagggtatcaaccacttcaatttgtttataaggttttaattttttcaaaaggctaaataaggcctgaggtacactcctttcagccagtaacgccagtacctcaggagcaataccatctgacaatcttaacttactttgcactgtctgtattgatacacccaatgcagtacatcttaaatcagtaatatatgccgccgttgccacgggatatcaaacaacgtgaaagcagcgcaaaagtgggtcgttagctcagttggtagagcagttgacttttaatcaattggtcgcaggttcgaatcctgcacgacccaccaattttattggtaccgagtgataattcaggcaacacccgaatgggtcgttagctcagttggtagagcagttgacttttaatcaataacacgccggtgccttctctggccgagtcgtggaccatttcgccagacggcaaaacatacacatttaccctgcgtaaaggggtaaaattcaacagcaataaatacttcaaacctacccgtgattttaacgctgatgacgttattttctccgttatgcgtcagaaagaccctaagcatccctatcacaatgtttcccagggtaattacgaatactttaatgacgtggggaagtatgtgaacaagtctggaggcccagacagaagatttaaagacaattcagaacttcctatatgcttgtatgaaaacctttcgtttacaagtcattctggactaaatgagttattacagctgtcgaaaactggctatggagaaagcttttcacattcaattgaaacacttagcaaaaaagtcatttctacttagctatgacatttttaaactgtaaataattgacttaaacacatctttctgcggcggataaattgtctggccggcctgccgttaagccgcaacggtactgagggtatttataaaatagggctgctgcttctcttcagccagcacgtcatgccaggttaaaggtgttgtcatctcgctctcctgcgaatctcattctgtgtctagcttacctgttaaacaccaatgagcaaaattacccgcggaaaagcaggctaagtgacaacagaaacagaactatttgagaaataagagctatctccacgatgtaacattacgggcagagccgtatatgtactggatagccgggcaagttaagaaacgtaacatgcctatggaactggtactactacccatagtggagagcgcttttgacccgcacgcgacgtctggcgccaatgcagcaggcatctggcagatcattccgagcacagggcgaaattatggtttcaaagtctattctcaggtgcctctaatcctgattgatgacccgtcgcaatccctagatgaagtcaacattgcatccttgaccgatctactccgttgtgagctcaggcattgccagttgattgtgtcctcccacgaggacgatatctcagcttatatgcgctaccggttcaacagagctggtttggcaacaagttcgctcaacatgcagcttttggcgaaagaagctcaatgtcagcagattgttcagtgcctgactcatagtggtcctcaataaacgccgtggcgaaagatacgctgagtataacgcagaaacgatagtggtccgatgggtagaataatcttaatacctgggcaaaattaggcataaatccgtgatttgtgccacacttgtttacgttatgtgaataaaacgacatcggatgggatcgatcccgccggtgcattgatgataaggaacggcaaatgccaatttcaaaattgtgctcgttgaatgcccggcatcactgacctcattgaaaaccaaagtatcgggaacaagatctggatatttgtactcaggccttattaaccaaatacaaaaaatcgacggaggtgcagactactctgctgttgagattgccagagccagcgcaccggatgccccgtttatcattaactctgaggacgataacgagcgccttttatgccagcgcagcagaatttcaaagcctactccttttttatcgccatcggtaataatttgataagccgcaaagatttcccgcttatgtaacgcctgcaaaatatcaatttccgcatccgaaaacccctgcggattattttttactgcacagacttcatctatgaaaacacgtgcatcgctaaaccataccctgataagatataatttatccaaccccactttggttttccacttattccccccaaaggcgtacaacatgcgaaaaaaaagcccgcattttcatgcgagctcttcttcaaatatggcggtgagggggggattcgaacccccgatacgttgccgtatacacactttccaggcgtgctccttcagccactcggacacctcaccatattgtcatcccgttgttgtcgggacgggcgctaatgtaaggaaaagccgtactgccggcccgataatcagcttcccggccgccaccagcgccttcacgcgtggcctgttttccggtttcacggcaaaataatcttccagcaccgccgtctggccgtcgagaacgtagtatttatattctgcgtcctgctcaagacgggtaaggatctcttccatattatagaccaaaagaatacgtgacgcttcggtggtgaagtaccactcccggtcccagtgcatatgtgattatcacataccaaaccaccctgttgtatgtgtagggttcaacactgcctttattcttagatattttacaaaacaaatagatgaacaatccttgccataagagcacagttgcaccaatgaataccacctccgtaactaaccatccagccagatagcaagcaatagactgaaacaacactactatgaatatctgaagcagatttctcatcgcaccctctctggcatatcaaaaaggtttaactgcgccacgccctggctgaaaaagtcacccagcataatgcctgctttctggtaccggtgaccatccttccagattttgtccaggcactttaccgcggcgttgatgatgtctctgctgtcctgcgttggcgtgagcagccttaccgatgcgctgtttccgtaatatggctcattaagggcaaatggtgaggtcttaacgaaagcggatatttgtctttcgtcgtggtgtaagcgcttcgggtttcaaaagagctgaaccggtgttcttggatactaaaacatcgttttattttatattattgcgatttatttctgcgtcattcgcttaatggtggaaatgtgatcagcgtcgaaacgctgtttcaatatagtgagggaggtggcatttttgactttccacggacgttcgccgcggcccatgaggaagagataatgagattttgccaccggtttgctcctgaaaaaggcttgttcagctagtatctcatgaatcgcagcgcaataaagtgctcatcgcaaagaggtggattgatttagacgtctggatgccttaacatccattttgtttacggtcattccccgtatctggcagaagaaaatgccacggctaacttacttacgataaaaataatctaatgattaaactttctaatatcaccacctctgtcaaggtgtttgcttcttgagggataatttctacaggggctttatagggcttacagacactaagaaaatcatgtatctgtaatgtcgtcatattctctttagctgcatcacgtttaaacgcttcaaccattgcagcactgtaacctttatctgcaaataacctgatccacttatcactaaatgattctggcgttttggcaacaggaatagaaacaactggtcggaacattttcatgttgaatttcatgaaaccgggcgcgctgcctgtttctggattgatgtacataaagatccgagcgcgagacacctgtcagcgcaggcgcgtatggaacggctgattacaagagcgctggttccggtcattgatgcgctggaagcgacgggagagattaacggcaaactgatctggagtaataccgggtatcttatccactggtatttaactgctgtcgtatatgggcttcttcagcatgggctgtatttttatcggcgtctttatgatgcccggcgcggtgcggcgcttcggcaagaaaaaggtctacatcagcgggctgatgatttgggtggcgggcgatctgcttaactacttcttcggcggcggctcggtgagctttgtggcgttctcctgcctggcgttcttcggttccgcgttcgtgaacagcctgaactcgcttttccggaccgttacaggtaagaataaacttctgcgttgccttaccttttgtggcgctaatgataaaatcatccacgccatccatgatgtggtcatgcatgacctgtacatttcctgccacctctcctgtgacgagaacgggtttaatgtcatatgcagcagcgcggctcacctgagtccataacaccgcgacgacaatcagcagccgggcgataacgtttctggctttggtgggctgctccggttcgaatgaacaggtccctgacaatccgccgaatgaaatctatgcgactgcacaacaaaagttgcaggacggtaactggaaacaggcgataacgcaactggaagcgttggataatcgctatccgtttggtccgtattcgcagcaggtacagttagatcttatctactcctactacaaaaatgccgatctgccgctggctcagctttataggccgaaacggactgcggtccaaagaacacatccgccctgccggactgaatataaagattgcctgaggcgtcgtcggtcaggtaaaccggcaacgcaggctcgcgcccggcctttttattctcttcgttccagcccagcagaatacgctcctgattggtgccagacccgacaatcacctttttcccggccagatctttcgcactggtgatcgactgtaggcactatccatttgggtgagctctctgcaacagctgttaaccagttaggtgacaaagatattaacctgacgattacatgcggtgcgcctactcaggttggttgggttgtgaatgacgatcgcgagtcaagtaaggctggtattaatgtcgatttcaacggcacaatgcaaaacatttcttactatcagtatggcgtaggtaaaaccacaggtggtgtgaatattaagtaatgaaagatgatgtcgttcaaaagatgaaagaaacttggtcaggtataacaaaatggtgggaagaaacaaaaacttccgcaagcaacaaggtagaagagataaaaaatacagtttcaaggaaatttgaagaaaagaaaaaagctgtcgttgataaaatgaaagaaataaagagcgatattgaagataagtggaatacagttgaaaaattcttcagcactatggcttcttttaatccattccagacagaagatgcggttgacttgataccttcccagatgtttgaaagtgtagatttaataccattccaaatgctactacttgtgctactaatcatgttccaaaccgttgaaatcgcttctttgatgctattgaatacagaactcgctgtggaaacaattgcgttccataagctagatagatagcttttaatcgtattccatactgtgagattcttttcgtatggtttcaattgttttttcattctctttcaccagtttgtttagctgatccagcatctcttgtttattacctaacgaactaagaatttgattataaatctttcggaattcttcgttaggatctacaatttctcgataatctccaaatacatatttatcttgtgtaggatcagtaaaagattcgtctccagctattgctcttgcttctaaaatcactatctctatgattctctgaccattcctgtcgataccgttcgtcaggataaccgccagctcgcctggcactgctttgatctgattggcaaactgattgaaggggaaacgccggagccgatccagcgtaagctggatgccaccctgcaacggcgatacaaggccgtggagtgacagggtaacgtatgaggggtacatctataactttaattaattaaagataaatttatttgagaaactttatctagcatacttatccctaatagtttgtacttttcagttgagattaccggaacggcgtctcagtaaacgaaatccgtgtactggtataccccttgttctgcaacaggaatgatatcccgtccatcatcattgatctgttactgcggggaccaattctgatgcttttcagtggcagcttgtctttggcttcaaggatcagatatgccgtaaaacgattcgtaacagccttggcaatctgtttaccgttgacgtattagctgagttgggcatcgacccggcaatgcgtgcggaaaatatttccgtagagcagtactgcaagctggctaattacatcagcgacaatgcgccgccgaaggagagctaagccatgattgattcgccccgcgtctgtgttcaggttcaaagcgtctacattgagtcccaatccgtcgtacttgcgtttttcggcgtcgtaaccgctgaacaggccatcttcgaagtggtaatcctcacgcacgatcaggctggcgttggtataggcttcggtgtactcgcggttatatttttcgttggtcatcaggtacagcagtacgcctgacaggaaagtgatgtcagtacctgaacgaataggggtgtagaaatccgccactgacgctgtacgcgtaaagcgggatatcgcttttaagaatagtcttaagcgcgttttattgcgaccacaatttttgacactctattttctcaaatttaaagagtcgaataattactctatgaaattatccctacgatgaccgtagcgtattttcaggggataaatgatgttcagaaaagaattttcgctactgctggtgattagcgccctgttctcaggacagattatggcggagcacaaagggcatgctatcaagcctaatgaaaaatagttcactgatatcaagtatttgatgttcggcaataagactctttatttttcatctattatagatgggtttaacaatgaaattgtaagttataaaatagctgagacacaggatgtttctcttgtattagatactctaaaagaggctttaaaaaagcgaaatgtgcttgatacgattttacattcggatcaagcaaaggtgtactcggaagagaccagaatgatgctcagaccgtcggccttgaactggttaatcagctgatagatctcttttttcgcgcccacgtccacgccgcgggtgggctcatcgaggatcagtactttcgggcgcgtcatcaacccgcgggcaatcgccactttctgctgattaccgccggacaacaggccaatcgcctgctccatcgatggggttttaacgttaaagagaccttcgatatcgaagacgtcgataccggcaaatttcttaaacagaacgcccttcccttccatcaccggcttaccggccagcgcaccgatgttccctaaccccagcaccgccgtaccgttagagataacggccaccaggttgccacgggcggtgtatttgtacgctgccagcggatctttttcgatttccaggcacggagcagccacgcctggcgagtaggccagcggtatatcttcacgaggcaaacaaagaagctgcttacagcgttttctatcaagatgggcgtggtgcatcaattcgacttgatgcgttgatggaagcacatgtttttgattttccgaaggatgaaacgatcattcaggcactagtggaaatgaccacggcaggcgacgatatagtgatggatttttttgcaggatcggcgactaccgcacatgcaactattgcagaggcaatcgcggcctcgacggtagtgactggcggaaccaggttaggcataacaatcgcacggccataaatttcgctggtatacggcacgacggttttcagcatgtcgccatcacgaagctggatatgccagtcgtctgggcggcggattttgagaacctgggattgtacagtcatggaagctccggcttgaaagagatcagtcataagatggctgtttttgccgttccagaccaaactggtgcagaagcgcgagaacctgaaaaactgggatacggataacgaggtgctctcgcttcttgacgtggtgcgcaacgtgaaaccggatattctgatcggcgtatccgggcagaccggcctcttcacagaggagatcattcgcgagatgcataagcactgcgaacgccctatcgtgatgccgctatcgaacccgacctcacgcgtggaggctaaccagagcgctatacccaccagcagacagcgcgttcacaaccgtactgaaggcgtgtatatcggaaataaaagggatcttgtcatgccgcatggactgggcacaatataagacaacggccagggcatccatgcatccccagaaaacgaaaaccttatctctggcgttcatgacagttgagcaatcacttaaccggcgcgggtggccattcgccccccttctgctagcgacgaattaaccctgcaaaatgattatgcagactcatatttttaacgaatatttttagattatcttaagtcatattttaataaatcaacctgtacataactcattgaaaaaataataattttatgcttttttgttttgagctcaaccttaaagatagtcaatatacgttttacacacgttatctgatgttccttctcactcaaatggatgtgtacattcggtaacggcagccagtgggggttaaaccttcaatataaagtccagccaagcccggacggactggcacaggcctttatcattggcgaagagtttattggtgacgatagttgtgcgctggtgctgggcgataatattttctatggtcatgacttgccgaaacagctggaagctgcaattggtaaaggtgacggtgcaacggtatttgcctatcacgtcaatgaaggaatataccgtcaccgacgctcagcaccccgtcataaagcacatagcccgccagcagactgacgactaacattagcggcaattcacgacgcaaaacatcggaatgtacgcgaaatggatgcagtaatgcggctaagcctaaaatcagcaagatattgacgatgttagagccaatcgcggtgccgatagcgaggtcaacctggccatgcaacgaggctgaacaaagcgcagtcctttgccttcaagccagcgacgcgcctttaactcccacgcgtcgccggtctgtttacggcttaactggccgggacaatctgcccctgctggtatttgagccatgataacttcctgttaatcacacaatcctgatcggcggtcagatcgccggtattcccgttaagctcgaagcccggtacctggcgcatctgggtgaagtggtttgccagatttttctggttgaaaaatggccttgttgcggggtgcgacaagaacaaaaaatgaacatcctgcaatttgatgggtggaattatgagtttcacattgttgagggcaccggtgtttcaggactatgccagctcatcttaactgaatgcaggtggcaacgatggcagaaaaaaacgagaaacgaaccggttcgctccagtctgaaatgacgatcgcactacataccggtcataagatgcctcgagcacgacattgtcataagtggcaccattaccccagacctgaacagaatctgggccgttaaccgcattctcgcctataaactcatttagctgcagtaatgcatcatcgagcggaatagcgtcatccattaccaactcagagcgcgcttcgggcgaagcttttagccagaagataatggtagatgcatccggaactccgccgcttcccacaagatataagagagaattatttagttgacacctatagcaacagatttttcccttcattaatcaatcacatcgaagaaaaaagaataaaaccaataatagatgaaaacaatgaaaagccttctataacagagacttacagaatattagaggaagaggcaaatgttattttaaatggattaaaacaacaacctttttacgaaggcttttctgaggctgttttcttagtaggttaattaggatatggtggtcgatattgtcaaagaaaccttgaatatcaccttcaataaaccatttagttccattaccactctttttaatttgtttcaaagctgtatgacaacccctatttttcctgaatccatgtgagttctcagagaagtttggttcataaattgcttctaagatatactttattactaattggacaagtttatcgatgcgctccatcagcagcggcccggtcaggtcgttcgggtcgcccggccagttttccacttccgtggtggtggtcagctgaccgcctttttccatcccggtgatcagtaccggttgcaggttagcgcgtgcagcatagaccgctgcggtataacccgcaggtccagatccaaggattagcagcttactgtgtttggtcgtgcccatgagatccccattgttaagtcaatcaggatctgggcctgctggatgccgataaagccaccgccatcatcaatgccgccgacgaagtgctggcgggcaaacatcccgacgaattcccccttgccatctggcagaccggctcaggcacccagagcaacatgaacatgaacgaggtgctggcgaaccgcgcaagcgagctgcttggcggcctacgcggcatggagcgcaagatccacccggccgcaataaccgtgctgccggttacgttatgccagttttgcgttttattgcgagtggtatagatgtagcggctgtggaaagcgcgaatgtcgctttcatagcccatatccgcaaactgctgacgaatatagtctgccgagagcatctcggctggggttccggtcatacggcccggaaagaccgtcgcaatatgccgcgcctgcatactggctatttcaccgtatcggaacccacgtcaccaaatcgttctgcatcttcggttgcgccgatgccgaatgagtccagcaccataataaatgcacgtttcataattgttctccgtacttagtgcttcataaaaatgcgatcagaacagtataccgctattcagtgatacgacgatagaccgtcggtgtggtttccggtgctttatcgtcaagagatattgccgccttcaccgctaagtggaaatgattcctccagtttctgctgaataccacctgagtgaaaatcctctgagagcaagcagttcactaacgatactggagcgaaaccacaaccatcttccaacatcttcgttatctaattcggcagatgctaaacgagttccatcggtttcaacaatgaaataaggtagatttttatctaaatctcctcttattcgtgtgcttactccttgatgtgcatcttcatcttcgtcgacatctgttctccatgcgcggaacattgcccaactgccgccaaatacatcatttatttcgcggattaataactcgtattgcccgccatcacgctgttctttgtggctcaccaaatttgcatattggctagtttcaagtgaagctacattttcaatgcgttgacggtagtaagagagccgtaacgacagatttcgagcagctacatggcggttgtggcgaagtggttaacgcaccggattgtggctccggcattcgtgggttcgattcccatcagtcgccccatttttattttaaaaattacaaataatctaatggatacttacatataattaagtaagaattcgatgggctatagccaagcggtaaggcaacggactttgactccgtcatgcgctggttcgaatccagctagcccagccattctgatacatagccagcgaaatggtccatgcatcccaagtggcattaaaccacacggagggttcatataatccatctttatcgtcggcctgaccttcgacgttttcaatttcatacatggcgccaatattaaattcccactgtttggctgattcagttgcttgcgcgcagctcacccctgcgcacaggacgagcgcagcacttcttagtagagtactcattctggtgctccttgacgctaactcttgagtggcctgttcattactaatattatgccctttcgcatagctttctactgcgctgcgcatcctgctggccatcatagaatcctgagcactcatagtgctgtctgcaccactggtcattgaatcactgctaccacggtttgagccaaactgactgagcgtattccatgcgctactcaaactactgttatatccatgtttctggaataccagagatgattgaccattctttcaatgaacaccgattctgaaggcattttttctgtaaaagccttaaccatatcagaaagggtcgatttcatttcctgcttgttttttgcagatgcgacttcagctgcatatttcgcaaacattgcatccacaccggaaggcttcattttacagattgtggtgaacttgaactgaaaatcttcgatgctgggttaaatgacaacgggagcctgagggttcccgttttttatgcacacaagacggaaacaacgctatgacccatgatatcccgctcaagtattatgacatcgtcgacgagtatgcgactgaaacggcgaaaccggtagaagaggcagagcgtacgccgctggcacactatttccagctgctgctcactcgcttatacaacaatgaggaaatcagtgaaggttggtgtccatatgctcgcaaatgctcggataaacgcaggagagacgacggcaggtctgctcggcgcgcggcgatttacagcgcagcatgtacatgttggccgttggaccacccagatcggagatcacaccggtaaagcccggcaccgtgtcgcaaatggcttcgatctcgttaacaatcgactcttcggaacggctctgaataatacggccttcgtgattatagacatcccgttcaacgcggtgttctcaaccatgtcgctgtttatcagcttcctggtggcctaccgcctggctgagcattatggcgaggaccgcatctcctgcggcatcctggcgctggtcgcgtttctgatcctgacgccctttatcaaagtggcggaaaacggcggcattaccgtgatgccggtggagtggattggcagcaaagggctgttcggaaattccagcaaatgaattagtaaagttaagaattactcaaaatgtattcggcattgtaacaatgttgataacattgtacgattcaatatttctcaaaagtaatatcaacaatgatgagaaaatatttatctggaaaaaatattttcattttatatttgttgctataggtttgatcattgtcaattacttaatactctattttctttctataaccatttgcaaaatcccagaacagccgcccaacaatcccgcccccattcaccgcctcagacaccagtacccgcatactctcatctagtccaatcgatcccttatcaaacgccttatgatgaatcgcacatagcgccagtccgttcgggatctcgcatggcccgccaaactgcttccattttatatgcgcggcttcaagtcctacagaggcgttatcatgtcgcatgtaacaccctggtagttaaagggaaagttaaacgtcacggacagcgtatcggtcgtcgtagcgactggaaaaaagcttacgtcaccctgaaagaaggccagaacctggacttcgttggcggcgctgagtaagtcggaggagtaatacaatggcagttgttaaatgtaaaccgacatctccgggtcgtcgccacgtagttaaagtggttaaccctgagctgagttcttgaaactcattatttggtatgaaagcgatgtctatttgtaccccggtgacagaatatatccgacaaaaaatggcgtcttcattaatggtgtgttcaagcctatatcgatatataacatatcaccttataacgagatgttgtggagtgaaattaaaaacaagatggcatgcccatacaaccgaaaccagcaagaagagatatgcacatacgcggatgtggtatcatctagcttcctgctgatttatcgacaaaggtaattgcttgaattcaaagcttctgtgctttgggggtatctttgggggtataagtaaagttataacttgaaaatttcatatttttcaatttattggagagcctattctaatcccttcgcccgctccagtctcctcataaattaacaagttataatttatcagttagttactttgctccaatggctgggctagctggattcgaaccagcgcatgacggagtcaaagtccgttgccttaccgcttggctatagcccatcgaaataattatcttcttttcaaagacaaatgttattgtaccataatgtccaataaaaaacaactgctatatagcagaagttaaaatggcggtcccgaccggggtcgaaccggcgatctcctgcgtgacaggcaggcatgtactccgttacgttatcgggagaggtaaatcccccgaaagagatttaccggatttgagaaaaaaagaatcagaacgagttcggatcgtaatccctggttgctgcagaaccctgttcaggggtttgagaagcatttggtacggtgtaaacgacgtcctggcctttcttaatgaactcaaccttaatcagtcgggctttcagagaaggtctggattcgccaggtcgatccttatttactgtacgcgatagcgaatgtggaatccggaatgaatccgtatgcggttgggcaaaaccgcgatggcacgcgggatgtcgggctgatgcaaatcaacagttcgcattttaccgcgctggaaagcagaggcatcgacgaatatcgattaatcacggagccgtgtacttcgatcatggtcggggcttctatcctttccgggatgattaaacgggccctggagaggcgctttaaaaaataccccggcggatcgtcgtaatcaagttaattcactacaaacgcgcgtgagcgctttcctgcggggatttaacacctggtcggaataaacatgtcaggacagtggacggtattaacttgccgctctttactaaccctttaaaacatcacaccctacgcaagacttcgtcttgcagatttttcttttacttcgtgcagctctgaggcggtgttgtaggcttcgcgcgtttcgacgtaggccccggcaaataccgggcaggacacagacgacacgatcagtacggtgatgattcttttcataatttgtccatgtatcaggtacagaaaggcctccctcctgataaacaggaaggacatagtggccggatttattgttataaagtgactgctgacgctttattgttggaaaggcccgaacaaccgtaaatacatcagcatcgttgctgagtaaggttttctcggtccggtaacggattaaagccccgcaacgtgttgcggggctttttacattggaaacccggaaaattttctgtagggaaaacgggcatgaagcagcaggccggcattggtattcttttggcgctcactaccgcaatgtgctggggtgcgctgccaattgcaatgccatttcggtgattattcgttgttgcataaaatcccccattccttgcgttttgctttcactctgtcgctgtagcgctgatagtgtttaggcttatttgggctaaacgaaagtgcccggcaccaatagtcattgttgagtaaaaccttacaaatgcgtcgccaggaagggatatcttttgcaccaatgtcaccctcctgcgtgtcgggaatatcgttcaaagagggtgactactactggaaagaccttatgggttgccaggtagtgaccactgaaggctacagcctggggaaagtcatcgacatgatggaaaccgggtcaaatgacgttctcgtcattaaggcaaacctgaaagatgcatttggcatcaaggagcggttggttccgttcctcgatggacaggttatcaagaaagtcgatctcactactcaaaccattcctggtgcaaacgctacgaactccaggatgatggacgcacctggctgccaaaggctggagctgaatctactggagccgtggacaacactgccgcaccggaaacgaccgttaaagtcgaaactaccgttgacaatgtcccgcttgaaaaccgcactccagcggtccgttttgccgtccacctgaccagcgacaaataccagtcacatatcactaaagaggtcactctaatgtcatgagtgcgactgaatttctaggtgtaccgtggtaaacaaggttgaatgctaaactgcgtgaaggataaatcaaggggtcttatcgacgaccatatcgaaatagacattgaaacgatatgtctctagttcagctcatctattttttgtggagagaggtgtgtttcacactagagaaccaactaaagtacattagtaaagattgaatcactttgcgtaaatcgcctggagccagatagcgggacagctgatcggcattggtttctctgcgtagagtcattcgcagacagttagcaaacgcgatttgcaggcggacaaactctccaagatgtttatcatccggcaaggtgttttttacctcgcgaaacagcgagcgcgccgctatcatcaactgcccccaaagcagacgcgcctcaacgtagcgccatcccggaactgctgcgcgtgctgatcgacgagcatcagctgagctgggacgacgcctgggccatcaccagccgcaccttcgcctacaccaaccacaccctgatgccggaagcgctggagtgctgggatgagaagctggtgaaaacgctgctgccgcgccatatgcagatcatcaataagattaacgaccagttcaaaacgctggtggagaaaacccgcatcaatcccaatttcgactcgaatcagcatggttcacctactgaagtgtgtttactgtccggcggggtttttagcccggcctcaacgaaatctgccatttgcatcaacatcatacgcagcgctttcggcatctgctccagttcaatggcatccattaaatttttgacgtacagaccgagctccgtgtcgccttcaatcaccagacgacgctggaaacagatagttatttttgaagaacgagttatgtccatagcaggcgtgcgccatcaccagcgcctgcatggtaatggtgttctcctccatcagataggcaatacatgggttagagttaatgacgatttcatacgccaatccctgctgcccgtgcttatacagccgctctgtctcaatgaattttttaccaaacgaccagtgcggatagttaatcggcatcggactcttcaatcaaccaccgctcatcttcgggtaaagcctgtaatgtttcaggcaggcatatacccagcattgagattgcatcaggggatgcgtctgttaatagggcatcttcttccagctcaacaaactccctggtggtgcggtactcatcaatcagcagattcctcgccgcccgatatagccaggctcgcggattctccatctcgcagaaactattaaagtacttgcggattatccatgtgctctgttctgatatatccaacgcagtttaactatccatcgcgcttagcttctaactaatagaagtccaacatgcaatccatcttctacatgcataagcgtcaccaggcttcgctgacggacgacgtttatgaggtcaagcagctagccctttgctcactgcatggtttacaagattcgccagagtctttagtggtgtaaacgatatgtgcgggatgagtcattaggttacaaagttcgaggtttattatttctctataatcatgacaacctttatgacaaggatttttactcatccgtgatgaagaaagtcgatcctgaaataataaaatgccccccaaacataaaattacaccttttagatccattcaaaatatccgatatgataaatatagcatcagatattaaacacttctacaagctaaaattggaggcgtatctaagatttctcattctctttcttcctactttgagcgcattcgcatccttgattctacaacctttcaggttccagatcgattcgcatctacctatcctggtgccggaggatgtagtcataaagctggtgtgaaaattcaactagagtatgacttgttgagtggggaattttctgatgtgaaaattgcctgtcattgtttttatcgataatgatggaacaaaacgtattcttgatggtcatctaagggttgaggtattgaaagatctgggagttaaaaaagtgcattgcctcatctcctctgttgaggattcttacacgtataataagcgagttaaccgtataacaattgttcaggaacaaaaaatgctactcagagctgttgaggctggagtgtctgtggaaatccagtacatcccagtcgtgcgctgtgcagtagatgggtttaacccagtcgcaagacgtatcggctacctcaacccttacggggccagttgtcccgcagctcgcgatcaacatcgtcgccaggcatatgattaacagtctgctgtacattgctggcctctttcgttgtttctaccctgcgttcggctgctgcgaccattgccgctgcgttatcttcggacggatgatacatccatggcattatgtcttgcggaaacgcttcttgagaaaggcgatgctgatactataggtttcaggaataagcttctggaatggtatcagcatggttataacagttcaaatggcgtctgttttgatataggtaatacaacgcgatttgctttagagcaatatttaacaattggcccaggatggagcggcaatactgctccagtgcggttgcctgccatgtggcagaagccgtcgtttctgctgcattaactgcgctcagggcagaaacagacagcagggagcccagaacgatagcgttcagtttgttcatttatttagtccttcaaaaaagaatccacgtgtataaaaaggggagcccctttttcgaggcggagtatagacagccgcaaaataacgaggcaatacagaaaaattcactcggacttttttcagcttgccgctctcatccagcttgttgatatcccgtcgcgcggtagcgggggagatccctaaacgttcgatcactttctcgacggtgataaaccctgtttgcgccaggagttccagtaaaatttgatgccgttgcgcttccgtcatgagctattccgataagaattgattttaaaagatgatatttgaaatagcgtgaaattacttgatgaacacctttggtgttgaggtggaaaaccagtcttatcagcgcttcgtggtgcgcggagcgcagcagtatcagtccccgggccactacctggttgaaggcgatgcttcctccgcctcctatttccttgccgcaggtgcgattaaaggcggtacggtaaaagtgacgggcattggccgcaacagcgtgcagggcgatatccgttttgctgacggttcgggatgttgcccagatactggagtcctatgttgcagagggccagccacgaatggctcaggtcatacgctcagtcttaattgatgtgttcaaagaagcacagcattatggcgaggtaccgccgggttataacccggctcttgctacaaaacaaccacgccgacggattacccgacaacgtcttaaccttgacgaatggcaaaagattttcgatataccgatcggctcaatgtggattgcgcccgcactgacaaaatcataatccttatcgcccgcgtgatctttcagcacgctgttcaggtaagggatgtgctggaaatagttggcgtcaatgtcatgccccgccagcgccgtgtttggcagtatgtagtcctggaagggtttaatctccagatcgatcccctgcttcgccagaatcggcttagcctgcaccgcgagattgccgccggtacaggactctgcggtagttaaccgcaaacctctgtccgtaagctcagtggcgagctttttcgtcagctcgctgatggtgctgttactgtcgtgaataagattgctcatcgcgttgcccttaattttcgccaggaataatagaaatatgaccattacgctcaagaatagcgtattttatctccttcaattctgtaatatattagcctcgcgggcatttaccgtgagatttctcacaaaccaaaaaagcgtctacgctgttttaaggttctgatcacagcaaggtgatggagaagctatgagttcatcgtgtatagaagaagtcagcgttccggacgataactggtcccggatcgtcagtgaactgttgggacgtgcgggcattacgattaatggctcatccccctccgatcccagaacctgacgaccatttttagtagccatacgagcacggaagccgtgagaacggttgcgcttcagtacagacggttgaaaagtgcgtttcatggcgatttctacctaaacttgaataaattcactgacttttgcgtatacccgaacgagattcgaacgactaacgcctcagcgtgggtgattaaagaggccggattgtaataattgtacactccggcacagatggtgaaagaagttgcctctaaagcgaacgacgctgccggtgacggtaccaccaccgcgaccgtactggcgcaggcgatcatcaccgaaggcctgaaagccgttgctgcgggcatgaacccaatggatctgaaacgtggtatcgacaaagccgtcgcttccgctgttgaagaactgaaagcgctgtccgtaccgtgctctgactctaaaggttgcgtgagcaggtgccccactcgatacgcgccagattatacagcggcgaaagcagtgccagttcaagcctgaccgtactggcgctgactgaacgtccggtacgttcgctgatggtattgagccgcatatcacggtagtcagcaatatccacagaagtgacctcatccatgcacttcagtgccagcgccgaacgttttatcacattgatgcggtaccaacaaatacgagtgcgcgcagattaactttgacttccatatccgctataaacagctcgacctgtgggcgcgattccaggacttccagacccgcattcgtgacgcgattatcaagcgccagtcgctcgatttcatcatggccggtttcaacggcattgagcgcgccgcaaaatctgaccgcaaaaaaaatccgatgcttcaggacgtggccgtggatacaaccttgccaaggttggggtcgcgggttcgaatcccgtcttccgctccaattttcaatatgacatgccggggtggcggaacaggcagacgcacaggacttaaaatcctgcggtgggtgaccaccgtgcgggttcgacccccgccctcggcaccatatgcgcccgtagctcaattggatagagcgtttgactacggatcaagaggttaggggtgaaagcttgagcgcgctggaggtggcgacagcgatagaggtcggttttcgcgaaattttcccgtcagcggactatgtcaaattaccggttgccgatggtggcgaagggacggtggaagcgatggtggcagccacgcatgggcgtcttgtccatgttcctgttaccgggcctttgggtgaacgcgtggaagggtttttcgggttatccggagacgggatgatcttcactttcacttcgtcggtagacagtttcagcaaggagtcggagatcgcttccacagaaccctgaacgtccgctttcagaacaacgttcacttcgtgaacttcgccttcggtcatgttggcgaacatattctcgagtttagatttctgctgacgagccagcttcacttcacggaatttaccctgacgatacagagcgacttcacgcgtgtgcctaccatggacgccgccgaggcgttcaaactgatcaagcagcaggtgagtgttccgctggttgccgatattcacttcgattaccgtatcgcgctgaaagtcgctgaatacggtgtcgattgtctgcgtattaacccaggcaacatcggcaacgaagagcgcattcgcatggtggttgactgcgcccgcgacaaaaacattccaatccgtacattggtcagattgccattgtgggcaagcgtgatgccatacggggagttaacgtaaaaaggctgagcctcagaggcgctggaactgccagcagtaggataacgaacgtgaccgatccccatattaccttgcagacgctgcatatggcgggcttcaaatacatcgtttaccaggccgttcgccttgcgtaaacggaagcagttgtttgcatcaatgtatttcctgaaggatagctagcatgactcgttttcggcagatgctgtatatcatcgtgacgggcctcgtcaccgcaggcgtgctgacgggctattacctgtggcaccgaacttacgttcagcctttttcatgccaggctaatctggtccagcaccatccggatgagacgctgacggtctggctgaattacaccttcgacgggaaattcggcaccctaacatgagaacaagatcataaccgctgacacagatgaccttctttcccctcccccatgcatccagaccactttttgtaaatccagcccaactgataaatacgccgcgagcccatgaaattttctgatccagcttgccatgaaatgcatggagatcagcgtttcctgttttagtgctatgccactttgcttccacaagataggtttcattatttaatgcctctaaggccaaacgatattagcttttatataataatttgttgagcagaaacagtctctgtcatcattgaacaccctgcagcattagttgttctattcatcatacagctccattgaattgccgtcgtcatccactggcggcatcctttccccatgaataatctaaattctctgcaggaaatcgcacgcgcgatccgcaaccttatccgcacccacgaccacgatccccgcctctttggcgcgttttaccgccgggccgatccctttggaatccgcggcgttgaggatgatcatgtccactttcgccgcaatgaagttatcaatctgcgacacctgctggcccagatcgtacccgctggagaccagcgtcaccttgacgttgtcccccgccagcttgcgcgcttccagctcggcacctttggtgatcctccttccaggcgccagagccgggctatgagcatcaaaaacagatgccgtctgccccgtcgccggacgatctgaaatcggaaaccgaaatagcccgcgcactcgcgcatctgttgccgccgcaggtaaaagagaagtttctgtgcgataaaccgctggagatccgcccggtcgaatttcataacccaatgaaggggcataccgctgagcccgcccctgtgccaggtattaagatcgtatgaaagtaatccggccggaacaccattatcccataatgaaggatcgacataccctgctggaagcttaagcacgtagatttgcgggaaattaagatccatttcctgcttgctactatcaaaattttcagaagcaccgggataatattttttgatatctacgcaagacgtttcgtcgtctttgacatcatcgccctctacggtattgccgacaggagacaacatgccaagtccggtcacaactacacgacgcttagacacgcttgtcctccagggagggataaaaaaagagattcgtgggacaacaaaagataaaactcaggcggtcgaatgaccgcctggagatgttcacttacgcctggtgaccgttgatgtaatcaatggcagcctgaacggtggtgattttctcagtcatgacggtgcgtacagaagcgagaaaagagatgtgtcagcttcgtgacaatgctcacaaagcccgtaaggcgccagcaaccagcgtgccagcttcctggaaactgacgccacagcagcaggcctttattgatgtgttcgcggaagacgaacccaaaaaacaataattttgaattttgcgtaatgatgcaaatagtctgaataaagactgtgcagccgagaatatgatggtgtaagtaaatatacgtgtttttttcctgatttgaaattaagggatgcttatgaggaattcagaaggattcaatatgataatacgctattcaaaaagcaactacccagtacaaataaagtcgataaattcaatgatgcaaaggttagttatgcatggcaggagagtaattcgttaaaaatatcagtggtcagagattagggataccataatgttgggcaagggcagttgtttctaatagatatgatggtatccagtaatgtgttccgttcatactaagtgagaatgttaaatcatactttgtcaaaagagattctcttagtctctcagcgtttggtactttaagtccatgctgatcagatagtttgtagaactcccttagcatcatgtattctgtttgaatttgatgccatatttactactctctttggctagataataatcttaacctacaagcctccttcacccatttactaaaattccctttccccgccgccttctcgatctgctccaaaagctcatcctcgaaacgtatgttcttcatcgtgctcttagtgcggtcaaaatttggtttctttttctcttgcatggtaggtaccacttcggttaatttattcgcacgtggtactcagcgaagacttgacttagatgagatatacttactactatgttgatagttttttaatattaaaaagagatgaaaatgatactaacgattgccaatacgaaaggaggagtaggtaaatctactctcgcggttaacatcgcagttgcaagagctcggcaaggcagaaaagtatggttagttgatggtgataaacaagggtcttctcaaacagcctgaaatcgaaatgttagaactgaaatcaaaaattgttcttactctacgtggcgataaagcagagaataaacttctcggcattcaatttggaagtaaaaagtaatcctccggcaggcactgcctgccgagtatcatttgcttgctcgttatcggtagcactatcaacctaccccgagactcaaaattcactctcatcttttttctgtaatgccaatgaggcgttgtgaccctaattcaatatgttgcacccgacttattttgtttactacaggctaaatgttatcaaaaataaatatccaacatgtattagtatattctttttcttattcttatgatacctacgttctttagtgggggttagtgtgattgcacaagtctttaaaagtaggattttaaggaaggatgacgttttatgacctcatctgtagatgtagttggctggcgtcgagatccagtaccccccggaagccgccatgccgcccatcgagaccactaccggcttgcctgcggcgcgcgcggcggccagttcagcacggatcacgtcagaggcgctgacgcggccgccagggctgttcaccctcaggacaattgccttcactttcggatccaggcgcgcatcgcggatctgcgacgcggtggtgtataaaaccagctgcgcattacattggggagataaatttcgccgtcattttccacggtcatcttacaagtgctattaacaatgttagcggtaatatttacgtctaatcctgagcttgcctggcctacgccaggcaagatgccaccagccaagcccataagcaacacaagaccgggctggtataaagtaaacggtgattgttgcatgctggttctgtggaataatccagtaactccagaagccaccatcgtaatctgaatgctggcgtaaccagctggcgatcatgttgtcagctgacggtgtaaaaaaagagtgcaggaataaaatcaagtcgttcatcaccatctgttacacaatagcgctgaaacttatctgtttcaaattgttcggctgattcacaagtggcggttttgacgttaattgtgtgatcgcgtatcacaggttcaggtatgccacgtatcctgcgaatcaagcggcagataccaaagtaatctatgccctcggtgctaaaaagaaactcgttttcagcgagagaaaaagttttctcatagccatcttcttcagtgacaagcgtaacgccaaacgctgcctcgcagtcatcaatcagggcatcgccatccatgccgcatatatcaaggtccccggctagggttaaccgggtacttagcaagcagaggggttagaaagagagacatcaacgatgcacacaccgttgaagaactcgcagccgcttgtgacgcccacaagcccggcgtggtgtttattaatgaggactgtttcattcacgaccccgctaacagtcagcacattaagcagatcattaatcagcatcctaagaccctgttcattgtttcggcatcactgactaaacatttacaacatctgctcaacactaaatttttctaattttatagcgttaaattttgtgattacgatcatgcgcagcagatgagaggaacacgcagccgaacaaatagtgaaacgtgcttagcgtcgcaaaattgagaattgatgtcgtttggcgcttcgcttacccgacctgcaaccttcagaaagcaaaaaccccggttccctccgttgggctcagtagcgaagccacgattttcaggagggtgcttttgccgcagccggagggaccggttatcagtttaaattcgcccggggagagacaaaaatcgacgtgctgaaggatggtgttatcacccacacgaaagccaacatccctgatatccagaagattttttttattattcattccgattccattaaccgctgtgatcgggatcagaaaatcatcctgtagcgttttcgagacggtttcggttttggtctggctacgtccggtcacgaagtaaatgctgtcgccgcgctttacgtgcatggcgatcagcgcgcgggcaacctctttcgggatactgaactcatcccagctgttgttcatcttttcccagaattccgggtttttcagataggcttcgctgtccggggagtaagaccgaaaactggtcaggcaagaggtatcaaaacgcaccctgccttcttatctggtagacaatcagcaccattattcgcaatttattttatgacgcaggcagggctccaggacaattcagaaagacagacccaaaaacaaaagcttaccctagccctgctatgcttacagtctacacagtgaaaaggagctacagatgaaacggttaccctgaggtaggtactgccggtaggtctgaaggcctgatctacaacttcgacggcatgatgtttggtgatacagaagatgcacataccctgctggttgctgcgcgtaaggccggaattgcggacgcgatggaagaacgtttttatcacggcagtatcaccgaaggtcgctctctctttgatcttcagcagctcgttgcaatggccgtagaagccggtaacttcatgtaatttactcacaattttagggtgattatgcccgattacgtttgtagaaaaattattgttcaggtcaagaagtcttttgccttctattgtccatatgtattgagcgtcacctttacttgcaaatactgcatgaggcccataactgaaagtacgccggctaaatccccccggtataaaatcaatacccttggtcgtttcttcttttcgatatacttatctttaggcgaacgaccggtaaaaatacccgtatcgacggcgatagcatccaggttcgtcaacacaccacgctcgtatccttccagtgccggattgagctcttcctgatacagcgtatcgtaatcggggttgtagaccacttcctggacgtcgtgaataccataagccttgagatcttgcggggttaaaccattaacacgcattaaccagataatccagcccacccggtcccgccatgccccacgagtctttcaggctgagatcggagagcccggcctctttaccggtatcgttaaatttctcatcaaagaaggtggtgtagttaacgcctgcaccaatataagggcgcaccttgctgctggaatcgccgaagtaccactgcgccatcagcgttggtggcaaatggtgcaccgtgcggtacgccgcttcattttcctgtcacactttcgcggtaagctggcctgttcccgattatttttgcgtatttgcagcccccttcgcaaaacatctgtttagcaactgttgaccttaattcacgctcgcactatcttcttgcagccctgcacaatttgcggctcgctgaagcggacctctcattccctttccacgcactgtccggcaggctttgttttgttcattatttaaatgttacgatcaagaataaaaacccttttcgataataagctgtggaaatctatcagttttcaattttttttatttttgaaaacaactgttttcattctttgatattttccattatatagttgatattacattacccccagtaaaagccccccagacaaattctgtcctcacgacgaggcctgttcgaaggcctctcattaggaatacttttgtttaggcgaaaaatgcccagcgaaatagcatacaaggaaggaatgagaacaagggatattttataactgacgatgcatataatcgataactttcgacgggtactgataataattccgatgcatcgtgagttatttttcgaatattcctgttttgtttcttttttcaggtttcccaggcgtgcggtgcaaacagatcgcagctatttccttatcaatcatatagtctgataaacaggcgatcccatttccttcaagacaaagctgtttcagcgtttctccgctattagacgaaagtccgcaggtgatctcatgaagttgtccgtcatgacaggctacgggccaggtgttcagcgagacaggttccgtaaagcccaggcacaggtgctgcttcagctcctcaacggtctggcagcgaagaggagtccgtcgctgttgcccgctttaatctggcgatccgttttgagcatgaggataacgcgtcgtggcagtgctgtccggttgcacggctgatccgggacggacaggggagctggcgtcatgatccggcattcattccgcctatggccctgttttctgccagcccggcgatgcgggaaaggctggtgttactgaaccgccaggaaaaaaccattcacggcaaaggaatggtagtcacatcatcagatatcgacggtgctttaggtatgatggacatcacacctgattttaccttcacatcaagtgatggcagtaacgttggttttgtgcatcgccgtgtagaagatggcgatatttattaccttgtgaaccaaaacgccaggtcagccgatatcgaagctcgttttcgcagtagaagaagctgtcgtttgggatatcctggacgaggttatccgcgaacacccggtactgctgaaccgtgcaccaactctgcaccgtctgggtatccaggcctttgagccggtactgatcgaaggtaaagctatccagctgcacccgctggtttgtgcggcctataacgccgacttcgatggtgaccagatggctgttcacgtaccgctgacgcttgtcggttgcggctaattgagcctcaaaatccttcaggttggcgtcgagtttgattcgactttgcggcataagttccactaatttgtcgtggattgcaaccgctgtaagccgcgctatctctggggagagccagagatgcatgttgtattcaccgtgatggtgatggtcgtcacctttttcaccatgagcatggtcgtggtcatgctcatcagaattacgcgttttgataacacttcaccaggggcgtttgcccctggtttttagcgtaatgaagccgcatctgaaaaatgcgtttcaaccaataccttatgcggggcaggtttacccgcaatgcacctgaacaacaaatcgcagctctcttcgcccagctttctcgtggggatatcaaaaccgcctggtgcaggggttaaaatgagagatagcagatgattactgcatcaggagataaatagaagtatcaccacgctgaatattcagtgccagcacggacggcttgctgtcgagaattttgcgcagttcagcgatgtttttcaccggctgctggttagcgcccatgatcacatcaccttttttcaggccgatacgggcagcaggtgagttcgctttcacgttgttcaccaccacgcctttatctgaaggtgaatctttctaagtgtgcagaaagaaagcgaaaggtaaaacccgcgcagcgagatttgcttaaaaaagcattcaccccgccgttaatgcatcagtattcagagttaacgatcacctcttcaccaaattttccggccatcggcagcggtcggtaggtggagttcgaggcgcgtaacaccctgatacctctggctcccacgtcgtgcgcggttgacagactgaggaagacgggagtgccccctccgggtttacccagagcaaacaatccgataaaaaacttgaaatatgtagggaaatcaaagagcgtttgaatcacattaagctccgcaattgagcatgtccagggagaaactgcgtgtcatgataaatccgcgctgaagatacgctttttagccgcacacttcaccagaaatctgttctatggatggacaggtgccatcgcataccagctatgccgaatggctcgtcaggcaaccgtacgcacggcaggagcaggggctgggcgttactcgcgcgcggatgctgcgtgacggcaaaatcaccgtgcctgagatgttcaatgatgccggggagtttctgaccctggacgaactgcgccgcgtggatgcgtcggcgtttgaggaatagggtattgatctttaaaaccatcaaaaaaatgaatgacttcactgctgatgatatgcggtacggtgatatggcgaaagagcagatactcgctcagggaaaaatgaacaaagttgacatttgggggcaggagtttaaagttaactttttcaattttgacaagactattgatgagcattttaagagcatggatagtatggggtactggactgcttggggagagatgcttaagcatttcaacttcgacagccatatccctccttctctcctatcacttggtggggctggaaccatttacttaattctctataaattactggacaaatccctatggagagcgccgttagtaggcagagctctgcgcgtgcctgacctctcaggtaagtggcaagttcaaggcttaacaaaaacggaggggggtaagccttgggggcagcgctatcaagataaatgccggcatcggccagcgcgggaaactgtgcgcgaaactgcgcaggactgaaagcgttcatggaattcctcatatcgattctacgatcgtcgcgcaaattcatcggcagggcaaggaagttgatatctatcagatttgtctgcttatcctggcgagtctgaaaaagcaggttatgctaaatagtgttaggcggcaatgtatgtttaggcggcgtaagagagcagtatgcgattgtacagataagaagcttcgctgacgaaaatttctggcaagttgatttgtaagatattgatgacggcacaatcaattattaagcaataactgccttagttactttcgaatgctaactttacttcatttgaaagcatgcctaccatcgtagtaagcatactgaggttgattaagtgacattagtgccgcaaaataatcatcaataaggttgacgaagctgttgttcaaaaaaatatggcctgagttgtcaattgataaaagcttattttcctcagcagaagataaaatcctgttaatttgaggtctggagatcttaagtttagagtataaggatgagcgtgtgcaattagttttatacagactggaatggtaaccaataatcggcacgggttatcgcttgtcgacccgtttctgaacaatgacaggagtgtgacgcgtgctggaacgtctgtcatggaaaaggctcgtctttgaactgatcttatgctgtattccggccctcattctgggggctatctttggctatctgccgtggtttttactggtggccgtgacgggattgctcgtctggcatttctggaatttactgcgtcacaagcggctggtcaatagcgtaccgggcttgtccgatgtcacctccagcttcgccatggaacagattaaatacaccacagcgttacccattgaataacttcttaaaataccttcaggaaaagaccgcgtgcgattatttgcccaattaagctggtactttcgtcgggagtggcaacgctacctcggcgcagtggccctgcttattatcatagctgcgaggtacgaatgtcaatgcgttccagcttgttgcgatcgatttcgggcaggtcgaggaagaaatcataattcactttctcttcttcaacatgttcaagacgcgacatcatattgatggctttgattgacgggtcctgacgatctttcgccgggcacacctcgacgcacaggttacagccggtacagtcttccggcgccacctgaaaatttggccaaaatcctggcagataagtttaacgaaggcgactggaaggagctgtttgctgttacagattgtgaagatgttccggaagggctgaatcaattctaccggcatgttcactggaacaacacggagttaaaaggggtggccatcgctgccatagaaactaccctggccagggacgctgataacctttctaaaatctgggcgctgggatgtaatgaaagcaaaagagctgcgtgaaaaaagcgttgaagagctgaacgctgagctgctgaacctgctgcgtgagcagttcaacctgcgtatgcaggctgcaagtggccagctgcaacagactcacctgctgaagcaagtgcgtcgcaatgttgcgcgcgttaagactttactgactcagaaggcgggtgcgtaatgaccgataaaatagagtttatttttactcaatcgcgctggctcctggtcgcccgtagcgggcaaaacctctatgatacactctaattaatactagttaacctgctactgccggttatgcgagaagggtggaaaataacatgagcgcggacgaaaacaacctgatttggatcgatctggagatgaccggccttgatcccgagcgcgatcgcattattgagatcggattagctcatcagtatccccataggggcatgtaataataccgttagccatataacgcgtatgatcaaggcgcggaaatgatggcgtcgtctgcgtgtccctgtaacagggtatcgacttatcacggccaagcgctataactggatgccattcaggataagaagacactacaggcccaagtttcgtgcaaataacgcttaaagcatcctcagtttcgataacgcgtggaatttggtttggggagacattacctcggatgagcgagcagttaacggaccaggtcctggttgaacgggtccagaagggagatcagaaagcttttaacctactggtggtgcgctaccagcataaggtagcgagtctggtttcccgctatgtaccgtcaggcgatgttcctgatgttgtacaagagtcttttattaaggtcctgcctgaaggaacccggctggtggattccggtgcggcgattgcgcgtcggacggcctggctgctggaacacgaggcgccggatgcgaaatcagcggaagcgaacatcgctttttgtatggcgataacaaaagaaactgaacaacttttacccgttttacagcgttacggcttcgaaacgctcgaaaaactggcgctgtagcacggggggaggaatacgcaaaatagtaacgccagtagacggcactgccgaggcgccggttggccgtcaggacggcttttgcgtcatcgtccacctgaacgaacagcttcagatgctcagttttataacctgatatacccgggacccagtgacgcagtgatgtcacggatttcgcttctgacgatcggaacagtgaaaggggctggccaaggctgctactaatgatgggcggcatttttatattagatatggtgaagttgatcctcaaagcattgttttcgggaacggagagaaggtccagcaggggactgttattgcaaaaacagggttgatgattgatccatcaacacggcgacatcctaacatcattcctggtcaggttgtctatatgcttcattttgagtattaccccggtaatgaaactctggtgagctggattacagccatatgaaagatctggtgctgggtgtggtcagccaaaacttccgtccggagttcatcaaccgtattgatgaagtggtcgtgttccatccgctgggtgagaaacacattgcgtcgattgcgcagatccagttgcagcgtctgtacaaacgtctggaagagcgtgggtatgaaatccacatctcggatgatgcggtattccgcaggagtggaaaaacaatcttgtacaacatgaacgtatcgccaaaatggctggtgaattgttcgatagagcccccgaagacactttcttataactgtttatctcaatgaaactacaggaaaagtagttttattttgtggcaagcgaagtcaatcttacagctactcattatcacatcaacggcgtttccgctttgcatactgtgcgctgcttcgtcccagtgttcggtatgagtgtgggtcaggataacggcatcaacagccagtaaatcttctacaggcacaggcaaagcaaccatgggattacgcaggtgcgggcgagcactcccggcaaaaccatcccaggcttccttttctgccagcattgggtcgataaggaattttttaccggcatattgcagcacgagagtggcaatgacaggcatttatcccgcgggcgaggatcgttaccgaaaagcgtgatcgttatggggttttgcccttcccacgtcgcttatgcgccggatggtctgtgttaaactacaaaccattacgtggaaacaggaatttcgaatggcaacaatgctggatgtctcactgcgtgcgggcgtgtcgaaggccaccgtttcgcgcgtgctgaacggcaaaagcagccttttcccgcagagccttttcattcatctgacctgcagcctgagagattccgctgatggaaagcgacagaacgcccagaataagcagtgattttttcatgattacctttccttttgattaataagggctgtcagccatcccttcacagcaatacagtaacgggaaaacgttcgctcaggcaataatgctaagcctgtccctagcccagcacatagcctacctcacggtgctatctgttccgtttgcggaacacgtctcaccattcattcatgcctgccgaagctcagacgacgacggtggccaaagccagtaaactagaaaaggcctctgagaggcctttttcgatcgtgaaatcacttctgaattaaataacgaatggttggtccgtcctgctggatatccagcacggtatggaacgtatgctaatagcattaaaaacgaatagagaatcaccttataatactaacatatcaatcaccgtgctttcctgcacgtcaccagagaaatatgaagaaaaggaagaattcagaaactatcttcatttcataggtagtaaaatcattcaccacatcaaagatgataatttacctgcatttcttaccaacatcctaaaagttaacggtattatacggtaatgtcacaaggtgctcgcttttatcagtttgattataaatcattaaaagggaaagttaccgagttctctgaaaacataggtgcatacaatgatgatcgttcagattgtgtgtggaagtaatgtttctatattattctaagcgtaacaataggaatgctgatgcaaggaattattcgtctcggtgacagaaccacgcaagagctaaattttactgacaacagacagttaccgtcatcatgcgatttaatatccctacgttgctcactatctttcgcgttgtgctcattccgttcttcgtcctggcattttacctgccggtcgtctgggcgccttttgcctgtgcgcttattttcctgatcgctgccgtgacggactggtttgacggttatctggcgcgtcgctggaactttcgtaaaaacaccgagcgttcgccgtcagaataccgtcgccagtatcacagccagctcaccgggaaggtcattagtccagaatgacctgagtatgctgcggagcggctaacattttacgcaccgcccccatcaccttttgtgggtcgcgtaaaaaggcgctaataccgcacttcacgtagcgcgcatgctcgaaacgttcgctgcccctaattttttgctggtaaaggtcataatacttactcctgaattatcgattcacggaaaggaatgcactttaagtatagacaatatccatacttaaattctgttcccgtgaaagctggtcgcgcaggcgtttcatcatcacgcaggtgatagtcacttcctgttatatcgctaatactaattttacgtgtttagaacggtttcaacaggtgcttgtcgaacgcatcggtagacggcatggaaaccacacgcgccttcacgccttcggcagtcagtttttcccatgctgctacagccagttcaacttctgaaccggtggcgatgaagatcagctcaggctggcccgcgcaatctttcagcacgtaaccaccgcgtgcgatgttcgccagctgctctggagtacgctcctgctgcgccaggtgacggcgttgatatcgccagaatatcagacgcggaactccgcgaggtgcgcagaaagaaaattgcgatggtgtttcagtcatttgcactgatgccgcacatgacggtactcgataataccgcctttggcatggagttagccggtatccccgctcaggaacgtcaggaaaaagcccttgatgcactgcgtcaggtcgggctggaaaatttatgaaaagattgatgtaaaccctgaaagtgggacatctattgccgcccaagggtatatagagataatctctcaggtaacgccccaaggtaatatgccaacgtctccaaaaatcctgtatatcaagagctttatatggagagttaaagtttataggcagccatatattaaacaaaagtgcagctcctacagccatatcacagtagccgcagccgacgacctggccggctattcttgataaacctgacgttatccgcatcggcatcagtattgcggcaggcaataaagccaaaaccgtccctccggttatctggaagcggattgttgatcaactcgctgatttaccctgcgagttttatgtcttcggcgcgccaaacgaacagtcgtggatggatgatatcacccgcctttacggtgaaaaagtaaagaaacaggttatgcacaatgttattaacagaatctgtggataaacacacagcttatacatggcaaatataaattgtttagctaaactaaatagctacaaataaaatgaaacaaaatgtaaatagcaaggggttgtacatgatttagaaatttggttagctaacctttatagcaaacactgttggtaaatgtttcatttctgaatttgaaataaaaattcgccatttatttggcgtggattcttacaccctgaataaaccaaaaggaacattttatggaaatcgtaaaagtcgaattaaatctgaaagcaattaacaaaagcatcgctttattcaactgcgacaagaaagtatctggcctgattcataccactgaaaacggtgaaaccatcgtcgtacttgatgggggttaaaaattctgtagctatagtgccacgttgtaacataggtgcagcacaccataaacgcccatttcttgtcacataataacgccatctcacaaacgctgcatttgctggtgctttgtctgaacacacagctcgaacccatgtatgatttacaacctggatattcgttctagctgttttaatgcgagtttttttgtcagcagtccaccattcatgacatcgcggaaaagaatgccaggttttggatagtcctggatacttttgatgctatttttcagatattcaagctgctgtgcagttgcggtcatcggtttgtgcctaaatgaaacagtgttactcacggcgcgcgacgagtcggtcaaagtaacagttgtttaaccgttgaccaggcgcacctgtgctcgaaaacggtcgaatttactgctttagattgatacttgcgttaatatccctatcatggtgtgtacgacaagaaggacagtcccattcacgtaggtttagatttttaacgtctttattttgatatccacaacaagaacataattggctggaagcaaatgttttcgatacgacaatgacttgtttgccataccattttgctttgtattctaacatggatcgaaattgcgacccgctctcatccgtggctcagggtacccgtcagatgggctatcaggccgcaaagctgctgcacagactgttagacaacgaatccctgccgctccagcgtctgctggttcctcccgttcgcgtggtcgaacgtcgctcaactgactaccgctcattaaacgatccggccgtgattcaggcgatgcactacattcgcaatcatgcctgcaaatcgtggaagcggaggacctctggttgctggatagcgttgatactgaaggttatgtgtgctggggatgtggtataaccatgtatcctgctgcatgggaaaaagataaaaaagtcagagcttattttaaaaagaaacgccatatccatcatcagcctgaatgtgatgctgatgccgaaagcatagtaattcgacagggccaaaaggagatctccgacgtcagaaaaacagtccaacgttgtaacacagtgccgcggacttattccccgacacgctcattcaaagcctgcggattgtacgtgataaacatcgcgtcaccgtagctaaaaaagcgatatttttgttctaccgcagacttgtaggcgttcatcgtatgctgataccccgcaaacgcggaaaccagcataatcagcgtcgattccagtcgctgtgaacgctctgttctgcgcccggcttgctcatgcagtactgaagtatctccgaaattgtcatctttattccccttgtagcgttgcgataattttacgcgaaccaccgtgaatgcgatgttctcccagccagatcccctgccacgttcccagcagtagccgtccgttgtggaccggcagcatcagcgagacgcccagtgtaatcattccatcggtccagccactgtagctcaagatacggcagccagtttctgtcgattttatagctgaacttgttagtaatttcccagtgatgatctttgccatttttgctgtggtaatcattcacccgctggaaaaagtgcggctcaaaggtgtagaaaaacgcatccgtcactttgaaattccagtagttggcgaattcatgtgatcgacaggctgtaccggggatttgccccgctgcaacatggctgcaccgatgttaagtttgctgacattactcatgcatacctcccgctctcaggagtcgcagagaaacgggtataccgaccttcatattgcaggcggatcgtacctgtaggcccctggcgctgtttgctgataataatttcagcgacccccttatcatctgtattggtaaagcctgtatacggtagtgagtactattatttcccagcgggtactcctgtttatggggatattcctaaaggttttgtgcacgctccagcgaaccttacgacggaagatttatatattatcaacagtgggggagatacaaaaacgctgcgaaaaaaaatgatggtttctatgaccacatcggcagtgttgctgtgggcgtcaatttgcccgttaatacaaataacgccaagtcaaaactatctgcttcagggtatgtctctggactggccctacaaacatcaacggctcccattgggagccgtctttttaacaactactgcatagcacgttggttaagccatctcagtttgcagacgcataacctgacggttgacttcggacatcacagacaagtgctgtttgtccttcactttctgtgcgaatgcagaatatgtagcctgagaagcatagcgacatttgcttctgttagctttctttcactgtttattaaacaaatcacttcccggagggatcttccctgccggggaggtttcctccttaagtaatttaaggagtcctgatgattcgctttacttcaaccgaactacgcccgcttttatcacagcagggcggtatacgcaagatccacgccctgcttgaacatttcccacagtggagaaaggtcgcgcagacggccgatggagttacgaaccagcttgatggtgtagtcaatctcttcttcggtagtaaaacgacctaaagagaaacggatagagctgtgtgccagctcgtcagtcatacccagcgcgcgcagcacgtaggatggctccaggcttgcagaggtacaggggcccccccgattattcatgtgccccatgcacttaacaaaagacgaagaggaaaagccgcaggttccgttccataccgtttacatgaccggcctgatccgcgacgacgaaggccagaagatgtccaaatccaagggtaacgttatcgacccgctggatatggtggacggtatctctctggaagagctgctggaaaaacgtaccggcaaattaaccagcaggtaaagaccaccaccatcagcgagtttgtagggcttatctttaggttttgcagtttcaacctgacgagctgtcagcttcattgggggtacctctcagcagggggtacaattatacccccatccatacccccacattgagcttgaccctgggggagtacaattgagttcaatagactaatagaatgctataactgctatacatgagaaagtaaggccaaacgccttaaaacggttgcaggagcatagattttcaaccattcatctctcagcttggcgacatcggcactcctgatgctagccatatagtttttcgccagctgagtgccttttagtatccgcaccaatgatcggtcttgcactgccccttttttgtcgggaacaatctctttttcatatcgcgttagacacgaccataaggacgttttctcaggcatgaatcgcagccgttttctcacaggttccctggcaatggctgccctgagcggcacttctggccttgcttctctgttttcccaggcggcgtatgctgctgactccgacattgccgacggtcagagccgtcgctttgacttctctgttctgcaatccatggcgcacgatctggcgaaaacctttggcaaacctctctaacgtttaccgatgggccatcggattctggtctctgattacccggctgaatcagcaatagttgtcggctttatttgtcggttctcaaagattatccctgtagttaccatggagggggactgtggttatcagtatggaggggaaactggcaatggcgaaacgtcattcgtttgttgtccgacaacaagcctgtctaccagcaaccggacagcgactatgctgagggtatcgacagacgcaacgcgtctaccatctggattgatgtacaactcatggcactccacagtaaaaagctctcttttacccggccaattagggtcagcttcgcggggatcctgtgcagttttgcgctgatcgccatcctggttatcctttcacagagaaaggattttcttgaggatgtctacgtagcggttcgccagtcggttgcgcataaggcctggaaacaattgcagggcgggaagattaaagggaagacctgccgcgttcgactgctgaagtaagcttaaaacgcgtctcagaaacgatatctgagacgctgccaggttacttgacttctaccacgttcaggcgaagttcatcgaactgcgcatcctcttcctctggctgcattgaactgtcggttgtgcctgataaaacgactgtcccaaggaagtactcagcatggctgaagctctcgttctcgtactgaatgtttctcctaatatcatcccagaactcatcaagctgaagtttttcccagctgaagtcccgctgatttcgggggataacgtaacgtctgttaactgaaagaatatcgtttatatcaacctgtattcggcttttggtccgcaacgcttctggaaaccgtcacgccaatcagctcgacctccggcatcagctgctcaagcccgaccgctaaaccggcatgggtccctgcattgccggacgccaccaccaccgaggataaacttaccgcgccttcgcactgctgagcgatttccagcgcgctctcaacatagccgagggcacccaacgcattcgtagtaaagaccaatgctgaggttcactttgtcgctgcgaggatcttctttgaaacgctccatcaaggagaggatagggtcgccggcgtaggcgtctactttctgaaacacgcgatgttctccggattattatgaggcagggaattcaacaataaaccggaagcggaagaagatcgaggggatgttaacagaagcgggatgcaccgctctttcagcttacgaataatggtaaaaaggtggttaacctctttttccgttaatgacgatgtaggttcatccatgatcacaattttcgcatcatatgagaacgctttggcaatttcgatcatctgcatctgggaaacggataatgtcccgacgcgggcgcgcgggtcgatatcaatatccagctcatcaaaaatggctttggtgtcgcatgggtaactcctttgattacataaatgaaaaggccatacctccggaaggaagtacggccttttagtgaacaaaaataacgggattaatacccgggtgaatacggtcagtaccagggatgccagacgagcaggctgtaacccagaacaagggctgggacgtaaacaatgcaggatgtcagatagataacacctgctatcatgtcagctcgatttatagcccgccaggcgatcgatagaaacgtgataatcgagcggggcatgcaggcaggcaattttagtgcgaccatgtttgataaatgagtcggttaatatggcgctgtcgtggaaattatccgtgtcgacagaatagatattctggtaattgccttccactttaccaataacgaccacgggcacaccgtattcgtccagctttaaatcgacgtcttgtagacatgaagaatcttcaccatgaagacttttagttttaacattgcgtttttccccggcctgcatattttgcattaaacgcttaaaagcttcatcacccctggtggcgttattactgctttcagacaccggggggcttgagatcggttctcctgtcctgacttcaatatcagaatcctcggccgcctgcattgcatcagctcccgttgcactgtgacagtgtataaacgtaacacctttcctgtatgagaataatgtatcaactattctcaaatgtcacaattacctggactgctaacgattaaagagcatatttgtgatctgtataatgggttattacaggcgttaccccgtattgtcaccggtgtgcaatgattctgcaaagaaagaatataaagcgctactggtgccactggacctcaaggtgttcaaggtaacacaggcgctaccggtgccactggacctcaaggtgttcaaggtaacacgggtgctactggcgctactggtgctactggacctcaaggtgctcaaggtaacacgggtgctactggcgctactggtgccactggacctcaaggtgttcaaggtaacacaggcgctaccggtatcatccagggcgacaaagtaggtctctgccttaccatcacgttgacccagaatataggtctggcaggtaccacgcgcgtggatcatagtaacttctgaagaaggtttaccggcaatggctgcaacctgggaacgcgtcatgccttttttgacgtcttttaccactggctgtgtgaactgatctttggtgcgatcgtaagctgtatgagatcatagacggcgtcgatgccgcccattatgatgccgcgccccgtcagggagaactggcgcgggtttaaccatttcaccatattaatgatgattttttgaggacttatgggcaacactaagttggctaatccggctccgctgggcctgatgggttttggcatgaccaccattctgctgaacctgcacaatatcgggatgttggctttttatggctgtacatgatgattttattaccgggtaatacgattaatgaacgggtttagaccatgtctgactgatgctgccgtaatcggtaataatggaatacgcgacggtagaacctccgacgttgccaggtaaagcaaaatgcgtttcagttttcggcacagcccaggtggcttttttgactttctgaccattcagggagaagttataccgaccagacaatttcggctattgagttcatattccacatctacagcggccgtttgatccaaaactaccagcgtggcctgggcctgtttatcgagagccgagaaggtaggcaattaaggtttctaactgccgagaagtctgaacacgacgcagtgatgtccatgagttctggtcaagtgtccgctctcagccttgccttcattgcgctggacagagagtaccgccatgcgctggtgtgtgggccggatcgcaactatctgtggatcctctcccgcacgccaacgatcccggcggaaatgaaacagcagatgctggacatagcgacccggcaagggtttgacgtgacgaaattactctgggtaaaacagccgcattagtgggtactgagttttaacccgatgatatttgctgatttcagctttacatttgaaatagaaacgttgtaaggggaatcattgtgtgcaatcaggtttagcgtattaccttgtttttgttgcgaccacgttaccctggctgctgcatttcctggcgtacctttcaggccgtcaggtcggaaaaagagtttaatacgtgtgcggaatgccagctggagctggttaggattttcacccgttcaatttgctccagatgccgcttctggagcaaataatcctcccttaaactccgttctgttgcttttttattccgcctgaagtggataagccatcgccaaattaaagataatctgcctgtggccgatattttatataaataatcatgctaaatgtgttaggttatattcaccataataatgattatctttatcagaggcttcatccctaatccattcataagtggagggttgatattactttgatcttttaaattgatggcctttgtttttatcatgaaataaaagaatatatttaatttttgtatgtactctctcagtatgtcatttttggaaaaaggagagtaaaatccttcaccttcaaaattaatacaggtgatctccttggattttgtcgcgaacaatcctattggaagcgcatcacttcgccttcgctcttgcctttcggatcgaaatcactcccgcctttaccgccgcccatcggcagggtagtgagcgcatttttaaaggtctgctcgaagccgaggaacttcagaatcgacaggttcaccgaaggatggaagcgcatcccgcccttaaacggcccaatggcggagttaaactgcacgcgccatgcgcgagtgtgtgccgagtaagaatcgtggcgcttgtgcaaagtaatggtttaaatcggggcttaatccacgtgactgaataatgcccgtatcaaacgtcacttccctcgcatacaaagagggtgacgcgaggactaccagaggtaatgtgccgcaaagaatagcgcggacacaaagtgcaaggcggctttttttacacaccgtcatatcaggccaaggttgagctcagaaagaatacgtattcctttgtccaggccggacaccaccgaaatcgtcgctaaccccgtgatgacgacgatcagaataacctgcaccgtttcattaatgggtaccccgaaaagatggttcaaaccggcatttacctgcaaaacgccgtacccaagcgatgttgcaacgccaaagaccgtgcctataacaacacattaattattattatcatttaccaatatgaagatgatatgaaagtgtaataaaaatgtggcgaattagttaggagtggagcgctgtttttagtgacctttccgggggcggagccagcgcacgacacgcgatgttttgtgtgaggacgccgacgggtaaaacaggctacactctgattttgagcgcgacaagctgaggacattccggacttatgcaggtggactcccagcactttaacgaactggctcgttatggaataaaaccggagcaccttatttccgatccatgtatgaatatctacaccggggcttactatcttgcaattgcattcaaaaagtggggagtcagctggcaggccgtgggcgcttataatgcaggtttcaggaaaacagaagaacaggcgcagagtccagaacattgtaatttcccttttatttaatagaagacgttcttctcagttgcatcgaattattaacaacgtatcgtttcaacggctctgcatggtaagcagctgactgaactccgggtcatccatcaataaattaaaattatcaacatccgctgtcttgtaactcaaaactcattcaaacacctttttgttcattatttaaatggtgacacaaaatatctaccagaagggttccgtctaactgtagcatttacaatacgcccctctacttcgcgacttttggcaaatcgaacaaggcctagtttcggcaactttattttgttccctacaacggcaatgttttcatttgtttgttttgtggtataagattgtacgttgttcttcttagatttaaagtctatggagaattgataagcgctgcttatcaatataagtttccgtgtttcgttttcgtttagttttgagagttcaattcagtgttgactcttaaatgaggatatgatataaataaatcctgcaatttgtatgggcctatagctcagctggttagagcgcacgcctgataagcgtgaggtcgataaggaacatttgtgcaaatgattattttaaacttacaggtgaatatccgccacaaaagttattaacaattgaaaataaaacgcaaatagagcaggagcagcaatagctggtctttttttattgctaaaaaagaccaactatgagaagtcaagaggaattttataaataggaaattaaaaaaactcctagtgtcaaggcatccaccgtgcgccctttctaacttaaccaaactaaaattaaaaaatatgagctacactgttatctagttttcaaagaacataccatttgctatttaaaatagctttttggtggagcctagcgggatcgaaccgctgacctcctgcgtgcaaggcaggcgctctttctttattggaaatgagttgctttcacttttagaaaatgcagggcgtatgggagtacctttgccttcagctttaacaaatgcagttgaaattttgggtggaaaacaaaaacaagaagagaaaaagaccaactatgagaagtcaagaggaattttataaataggaaattaaaaaaaatttcttgtgctaatgcttgatactctttgtccatagatgcgatatctttatcgttgttagtaccgcttgatgcttgtgttgcaagatcacgcatacgaagtaagatgtttgaaacagaacctaatgcagcgtcaccagtacgtaaagcagacatagcgtcttgtgtgttacgactaatagatcgaggacttaaccatataatatgtagcaatgttatctagttttgagagaatataaaaaacttgttgactttaaaatttaaataagttaaaatgattcttgtcttaaatgaatacagtctggtaatgatggcagagaggtcacacccgtctaatagatcgaggacttaaccatataatatgaagcaatgttatctagttttgaaagaatataaaaaacttgttgactttcaaaagtgaatgagttacaataattcttgtcttaaatgaatacagtctggtaatgatggcagagaggtcacacccgtctgaaccgtctacattttatggagaaatcagaagatactctttcactttcaaagtccccacaaactatattccgcaacaacacgcattgattgttaaagtttgttctggaaatgctgacatgagacaagggacagcgatttgtgtaagttttacgcataagatatgcttgttcttctgttggatacaaacggaatttatatgctttatcatatcattttacctcacttttcaccttgattttgggtgtttttgcccatccccccgaaaagggggaataaggacaacaatactttatcaattctaataagattcgtatcaatgccttttgcagttaaccatttcaccattgtctcggcattaatggctacctttgaaacatcaatttctaatttttccgatgaaaagttaatagctgcgatgatattcccttttttaactttaagggggagcaaaagctctctcttttttattaacgaggaggaaaagccatgaaattaacactattaatcaaggaagaaaagaaaatttttcatttaccggagtttattccagcacgtttaattcgtcaagcacctgaactttttttgttccccattcgtcttggaataggaaatctagcattttaacagttacaccgtctttatcaatggttatcttatcaccgtcaattctaataagattcgtatcaatgccttttgcagttaaccatttcaccattgctgataacacagactcattaaaattcaatgatgttccagcaaatcactggtctacgaaagcaatttatgatttaacaaaccgtaaagtagtgcaagggtacggaaataatatctttggctttggtgacaatgtaacagctggttagagcagacggctcataaccgtccggtcgtaggttcgagtcctacaaggtccaccattagacgtatatatctcggaggtatacccaagttcggctgaagggatcggtcttgaaaaccgacaggctatttgctggaggtgtcgtatttccttgacctcctccgttatttgctggaggtgttgtatttccttgacctcctccattatttgctggaggtgtcgtatttccttgacctcctccgttatttgctggaggtgacgggaccaacgggagatacgggaccaacgggactaaccggagtaacaggaccaaccggagtaacgggaccaacaggagtaacgggaccaaccggagtaacaggaccaaccggagatacgggaccaatcgcctgccttacaagcagggggtcggcggttcgatcccgtcatcctccaccatataaattttatatgaatagtattatcgcggggtggagcagcacggtagctcgtcgggctcataacccgaaggtcgcagccaagaaatacccgcaaaagccaccgaaagtggcaataaaggtttttaataatacctcaatacgacccatcttttcatctcctcgtatgattaagttaggtttttagggacgggatgtacctataaatcatgcgcccagaactctccaggcgcggttgtttcgttagccgaaggcatgtttttaaatttcatgatagtctcctatgcgcccagaactctccaggcgcggttgtttcgttagccgaaggcatgtttttacgccggtagcgcctgtgttaccttgaacaccttgaggtccagtggcaccagtagcacctgtgttaccttgagcgccttgaggtccagtggcaccagtagcgcctgtgttaccttgaacaccttgaggtccacgaatgccggagccacaatccggtgcgttaaccacttcgccacaaccgccatgttgtgtaaatatatttggcaggggcagtaggaatcgaacccacactggaggttttggagacctcagttctacctttttttcatgttttgacaagttgcggtgagataagcctgcatttggacagacttcagcccctaaatcgagcatatcgatagccatgtagttctttggcgtccgcaaagcttcgctctatagttgaacttctcttcctgtatttcttagtttgttttgtaattcgatttctcgttctgctgtctgtctttcgcctttcacattgccttgctgtccttcttctcttcctgtatttcttagtttgttttgtaattccccgacctcacgggtatgaaccgtacgctctagccagctgagctacaccgccataaatgatattaatataagtggagcctagcgggatcgaaccgctgacctcctgcgtgcaaggcaggcgctccagaatgtatgcccacaagatttagttgatacgtataaccaaagtcagaatgtatacacacaagatttaattgatacgtataaccaaagtcagaatgtatgcccacaagatttagttgatacgtacagaggactgaaaatcctcgtgtcggcggttcgattccgtcccgagccaccatttattttaataaaatacgccggcttagctcaattggtagagcaactgacttgtaatcagtaggttgggggttgaccttcgggttatgagcccgacgagctaccgtgctgctccaccccgcgacaatactattcatataaaattatatggtggaggatgacgggatcgaaccgccgaccccctgcttgtaaggcaggcgttggtcccgtatctccgattggtcccgtatctccggttggtcctgttactccgatcggtcctgttactccggttggtcctgttactccggttagtcccgttactcctgttggtcccgtatctgcctgtcggttttcaagaccgatcccttcagccgaacttgggtatacctccgagacatatattaaataaagtggagcctagcgggatcgaaccgctgacctcctgcgtgcaaggcaggcgctcactcgaacctacgaccggacggttatgagccgtctgctctaaccagctgagctaaaggtcctttatggtagcggcggaggggatcgaacccccgacctcacgggtatgaaccgtacgctctagaccgctgacctcctgcgtgcaaggcaggcgctctcccagctgagctaaggccccatgtttttaggaatatcgggaagacaggatttgaacctgcgaccccctggtcccaaaccaggtgctctcccgaaggagcggatttacagtccgccgcgtttagccacttcgctacccctccgaaacttacatggtgccggctagaggacttgaacccccaacctactgattacaagtcagttgctctacatagcttccaatatttatctggaacatctgtggtatggcggggaaggttttttaaaacactgttttcttttggtttaggatgaaagcattccgctggcagcttaagcaattgctgaatcgaagcaactgacttgtaatcagtaggttgggggttcaagtcctctagtcggcaccagtttttattgtaagagccattagctcagttggtagagcatctgacttttaatcagagggtcgaagagaggactgaaaatcctcgtgtcggcggttcgattccgtcccgagccaccattttgaaatcacgagccgacttagctcaattggtagagcaactgacttgtaatcagtaggttgggggtccttcgaccctctgattaaaagtcagatgctctaccaactgagctaatggctcattttgaaagtggtgccgactagaggacttgaacccccaacctactgattacaagtcagttgctcaactctcgaccagagcttggaaggctcttgttttaccactaaactacacccgcattaaattgtaaatggtgagccatgaaggactcgaaccttcgaccctctgattaaaagtcagatggctgaacaaaattttggaacgatggtaattggatatgataataagcctggaaaaataggtttgatttatgagagtggtgattatccgaatacatggaatcagtattatggtaggttgtcctgccttacaagcagggggtcggcggttcgatcccgtcatcctccaccatatatatttaaaatgtcggaggggtagcgaagtggctaaacgcggcggactgtaaatccgctccttcccgccgacacgaggattttcagtcctctgctctaccgactgagctaccgagcctttatgtaaaaaatggcggtcccgaccggggtcgaaccggcgatctcctgcgtgacaggcaggcaaaatggaataggtaaaggagcattacacatgttaacaaaaatgaagaattggttaaaaaacgaagactcacaattatcatcagaaaacggtatgttaatcgcgttagcggtgattacagaagtgaagccagacccaaaaccagaagaaaaaccagaagtgaagccagatccaaaacctgaagaaaaaccagaagtgaagccagacccaaaaccagaagaaaaaccagaagtgagaggcggaacgggaacagacaacggaaccggaggaaacccaggaggcggaacggggaaagataacggaaccggaggaaacccaggaggcggaacgggaacagacaacggaaccggagctagcgcctttggcgtgggggttcgactcccttcacccgcacttttaataaaatatctcaaacatgtcttgcggaagtagttcagtggtagaatacaaccttgccaaggttggggttgtactgttgctgctcctgcccttgcagtatgctctaccgcttcatttcctcttacattattttgtacatttacatctcgttgtactgttgctgctcctgcccttgcagtatgctagcaactgacttgtaatcagtaggttgggggttcaagtcctctagtcggcaccagaaatcatggcggttgtggcgaagtggttaacgcaccggattgtggctccggcattcgtgagcgcatgacggagtcaaagtccgttgccttaccgcttggctatagcccattaattaagaatggtggaggggggcagattcgaactgccgaacccgaaggagcggatttacagtaaaacaagagccttccaagctctggtcgagagttcgattctcttcacccgctttttaattatgggcctatagctcagctggttagagcgcacgcctgataagcgtgaggtcgatagagcacctggtttgggaccagggggtcgcaggttcaaatcctgtcttcccgatacttgtttggggccttagctcagctgggagagcgcctgccttgcacgcaggaggtcagcgccaggaactggagaagaaacaaacccaaacgcgtagagggaggggggctaacgtttagtgagtttatggacgagctctacctctctttattacgtcaggggtataaacaccatctgcctgcctgtcacgcaggagatcgccggttcgaccccggtcgggaccgccatttatgttggctcggtagctcagtcggtagagcagaggactgaaaatcctcgtgtcggcggcgctgacctcctgcgtgcaaggcaggcgctctcccagctgagctaaggccccaaaatgtatggtgggcctaaatggactcgaaccatcgacctcacgcttatcaggcgtgcgcctgtaaatccgctccttcgggttcggcagttcgaatctgcccccctccaccatttacataggggcatagtttaaaggtagaactgaggtctccaaaacctccagtgtgggttcctacttcttctagctcttctgtttctgtaattacttctacttcttctgactcttccgcttccgcaattacttctacttcttctagctcttctgtttctgtaattacttctactgcgccgatggtagttgggaccttgtccctgtgagagtaggacgttgccaggcaatccggaggattagctcagctgggagagcacctgccttacaagcagggggtcggcggttagcacctgccttacaagcagggggtcggcggttcgatcccgtcatcctccaccatttagccgacttagctcaattggtagagcaactgacttgtaatcagtaggttgggggtcgaccgatcggttaacagccgatagctctaccactgagctactgcggaataatattagcctggcaacgtcctactctcacagggacaaggtcccaactaccatcggcgctagcaacggactttgactccgtcatgcgctggttcgaatccagctagcccagccatttacgagccattagctcagttggtagagcatctgacttttaatcagagggtcgaaggttaccgccgaccccctgcttgtaaggcaggtgctctcccagctgagctaatcctccattttgcctggcaacgtcctactctcacagggacaaggtcccaactaccatcggcgctcgaatgaaacagcaagtaacgctaagaaagaatcagaagcagcgaaaacacttgctgaaaaggtacaagagaatattaaaaacaatactgttgaaattatagaagctaagaaccgccgacacgaggattttcagtcctctgctctaccgactgagctaccgagccttattaaaatggcggtcccgaccggggtcgaaccggcgatctcctgcgtgacaggcagcttctactttcttctgttcttctgctttcttctgttcttctactttcttctgttcctctgctttcttctgttcttctactttcttctgttcttcggctttcttctgttcttgttaacctagattagtgctatttaatcaattctaaatctacccttatgggcgcacgtataaatgctaacttaaatatgtacattaacgcttgaataaatatgtacattttcgtagagcatctgacttttaatcagagggtcgaaggttcgagtccttcatggctcatcatttttgcggaagtagttcagtggtagaatacaaccttgccaaggttggggtcgtttcaattaatggaaaaccgtagagtttctatccttaagttgatgggcatgtgttagtaccccatccctatcaagctaatagttttaattaccccataacgaaatttttagcaacgtatttatatcaaaaaatagatgagtcgaaattaaaagcctatacccgttaccaattaagagggtatatcgaagatagtcaagacttagaaatctatttaattcgctatagcttccaatatttatctggaacatctgtggtatggcggggaagttttttttagacactgttttctttttgttttggatgaaagcattccgctggcagcttaagcaatttgtctaatacctgatgtgtatccctgaacagtgttctcagttttattctcttgttgggtgtttttgcccatcccctcgaaaagggggaataagaaaaaataggatgttttcgcgctcttcgggagtggttgtaggagattcttttcctgttttagggcaaacactcatgcccatcaacttaagaatttgcactacccccaagtgtcaaaaaacgttattcgaaaatgtacatatttattcaagcgttaatgtacatatttaagttagcatttatacttttgtattatacacctaaataatcttaataatgagaatattaattatcaatttaaaataaaaattgacgtttcacgttgtttgtttcgttcagttttcaaagaactaatggtggagcctagcgggatcgaaccgctgacctcctgcgtgcaaggcaggcgctctttctttttttatttggtatatgctttacttgtaatcgaaaataaagcactaatagggtgtttttgcccatcccctcgaaaagggggaataagaaaaaataggatgttttgcaacggactttgactccgtcatgcgctggttcgaatccagctagcccagccattaagagccattagctcagttggtagagcatctgacttttaatcagagggtcgaaggattttgtacatgcttaaacaagcgaaaatgtacatgtttatcttgacatttacacaaaagcacgttctattgtagaacgcgcttttcctgaatgagtctatactaataattctcccgattggactttcaccaactagataatgtgtccttatctggacacgccgatctgccagcggagggagtaaaaatcatggatttgttccatcggaaccacttcctaccggttccactggagctaccggggctactggagctaccggacctactggacctaccggttccactggagctaccggggctactggagctaccggacctactggacctttaacagcggtacaggcaaatcaattttcttttgcactaaatggtacaccaattgttcttgtaatcgctcctaagtcaccgactgttcgtaagtctaggtgcataaaaccactggacctcaaggtgttcaaggtaacacaggcgctaccggcgctactggtgctactggacctcaaggtgttcaaggtaacacaggcgctactggtgccactggaccttgcttaagctgccagcggaatgctttcatccaaaacaaaaagaaaacagtgttttaaaaaaacttccccgccataccacagatgttccagataaatattggaagctataaaacaagagccttccaagctctggtcgagagttcgattctcttcacccgcttttagttctttgaaaactgaacgaaacaaacaacgtgaaacgtcaatttttattttcctgccttacaagcagggggtcggcggttcgatcccgtcatcctccaccatatatgtcggaggggtagcgaagtggctaaacgcggcggactgtaaatccgctccttccgtatatagcttccaatatttatctggaacatctgtggtatggcggggaaggtttattaagacactgtttactttttgtttaggatgaaagcattccgctggcagctttcaattaatggaaaaccgtagagtttctatccttaagttgatgggcatggggcaaacactggaatcttaccagtcccttgatgaaatgtttgattaattcttgcataagccaatgactcctgataagccaatggaaaaggaagacatgaagcctgataagccaatgactcctgataagccaatggaaaaggaagacatgaagcctgataatagtttgccaatgatgaatttgaaatagagatttccacgttttaaatatgatttgtcgggtaaaagactggcgcggtatcagttgtgatccgtttccagcctctcgcggaggaaatcacatggatgttgcaaaacagttttcttcttatcttaaacaagagaataaaactgagaacactgttcagggatacacatcaggtattagacaccttaaataatgccagatatccatttcgttatcgatatgatggtgtttataccccatgcccatcaacttaaggatagaaactctacggttttccattaattgaaatatagcttccaatatttatctggaacatctgtggtatggcggggaaggtttttttaaacactgttttctttttgttttggatgaaagcattccgctggcagctgtgcggctggatcacctcctttctatggagaattgatgaacgctgttcatcaatataagtttccgtgtttcgttttgttcagttttgagagaactatctctcatattagtatagactcattcaggaaaagcgcgttctacaatagaacgtgcttttgtattatacacctaaataatcttaataatgagaatattaattatcaattttcagaaccgctaattccttcccttgcttcgctccacggtttgcgatccctagcgcccccgccacggcttcgctcactttagaagctaaattatattggtcatatgaccaatataatttagcttctaaagtgagcgaagccgtggcgggggcgctaggtatcgcaaaccgtggagcgaagcaagggaaggaattagcggttctgaatagcttccaatatttatctggaacatctgtggtatggcggggaagttttttttaaacactgttttctttttgttttggatgaaagcattccgctggcagctagctgccagcgaaatgctttcatcctaaacaaaaagaaaacagtgtcttaaaaaaccttccccgccataccacagatgttccagataaatattggaagctatgacttttgacctgctataacaggtctttttttgcatctcgtacgcaacatgtgtttctattagatcaccagccccaactggtggtttctctttatcattctcaacgtatttatatcaaaaaatagatgagtcgaaattaaaagcctatacccgttatcaattaagagggtatatcgaagatagtcaagacttagaaatctatgcaaatcaagttgattgggaaactggtcagataaaatccaaataccaagtaatgaaagatgatgtcgttcaaaagatgaaagaaacttggtcaggtataacgcaagaattaatcaaacatttcatcaagggactggtaagattccagtgtttgccctaaaacaggaaaagaatctcctacaaccactcccgaagagcgcgaaaaaaaaaaaagaaaaaaaaaaaaaaaaaaaaaaaaaaaaaaaaaaaaaaaaaagaaaaaaaaaaaaaaaaaaaaaaaaaaaaaaaaaaaaaaaaaatttatttatcagtgtgtgttcttatgtgatactttttgtaaattgagtgggaataaatgaataaatagctgtgaacgttgaagtaccacgtttttaccactggacctcaaggtgttcaaggtaacacaggcgctaccggcgctactggtgccactggacctcaaggtgttcaaggtaacacaggcgctaccgatgaccaatataatttagcttctaaagtgagcgaagccgtggcgggtgcgctagggatcgcaaaccgtggagcgaagcaagggaaggaattagcggccgctaattccttcccttgcttcgctccacggtttgcgatacctagcgcacccgccacggcttcgctcactttagaagctaaattatattggtcatcttaagctgccagcggaatgctttcatcctaaacaaaaagtaaacagtgtcttaaaaaaacttccccgccataccacagatgttccagataaatattggaccttgaattccttgcgggccttggattccttggggaccttgaattccttggggacctgtcgctccggttgctcctgtagctcccgttggacagctttatggttagcttcttcctgagctttacgttgagtctcttcttgagctttatggttagcttcttcctgagctttacgttgagtctcttcttcgggaccaacgggactaaccggagtaacaggaccaatcggagatacgggaccaacaggagtaacgggactaaccggagtaacaggaccaaccggaaaaacgaaacacggaaacttatattgataagcagcgcttatcaattctccatagaaaggaggtgatccagccgcaccttccgatacggctacctctgttccttcacctggtttttctgttccttcacctggcttttctgttccttcacctggtttttctgttccttcacctggtttttctgttccttcctcttctttaggctttactatttcttgcgcttttacttcttctttgacttttgcctcttctttaggctttactatttcttgcgcttttactcatcgttatttaccgcttcacttcctcttacattgttttgtacatttacatctcgctgtactgttgctgctcctgcccttgcagtatgctctagctgccagcgaaatgctttcatcctaaacaaaaagaaaacagtgtcttaaaaaaacttccccgccataccacagatgttccagataaatattctgccatcatcaccaaactattgaaggcatattccttcaaaactagataacattgcttcatattatatggttaagtcctcgatctattagagcctaaagaagaggcaaaagtcaaagaagaaccgaaagcgcaagaaatagtaaagcctaaagaagaggcaaaagtcaaagaagaaccgacatcgttatttaccgcttcacttcctcttacattgttttgtacatttacatctcgttgtactgttgctgctcctgcccttgcagtatgctttccgtgttcggtatgggaacgggtgtgacctctctgccatcatcaccaaactattgaaggcatattccttcaaaactagataacatttgtggagctgacgaatactaatagatcgaggacttaaccatataatatgtagcaaatgttatctagttttgaaggaatatgccttcaaaaaagaaaatgtaggaaatatagtgtcgccgcaagtgaaaaaagaaaatgtaggaaatatagtgtcgccgcaagtgaaaaaagaaattcgaaaaatcgttgatatattgcaagttacgatagatatattcgaaaaatcgttgatatattgcaagttacgatagatatattcgcttagcgtggtttttttccgaaatgctggcggtaccccatgcccatcaacttaaggatagaaactctacggttttccattaattgaaagagctcctatgttctcttggatacatcgtagtgctgaatttaataatataattccttcatcacaaattacacaaatacctttaaagctgccagcggaatgctttcatcctaaacaaaaagtaaacagtgtcttaataaaacttccccgccataccacagatgttccagatgtagcacactacagtttactgcgtaaacccgtgtgcccttcgggacatttcggctcccgccgagccataacaagcatggcaaaagtagcacactacagtttactgcgtaaacccgtgtgcccttcgggacatttcggctaccgccgagccataacaagcatggcaaaacaattaattacggtatgattgcggaggactctgacgatgtattcaccacaccacagaaagacgctgtaacactttatagctcgtctatggagaattgataagcgctgcttatcaatataagtttccgtgtttcgttttgttcagttttgagagaactatctctcagccagcggaatgctttcatcctaaaccaaaagtaaacagtgtcttaataaaacttccccgccataccacagatgttccagatatcgcaaaccgtggagcgaagcaagggaaggaattagcgggtctgaatgggacaaatgctcccgctattttaatagaggttgtgtttattatcgtaaagctaaaaatgctgaagagtttccgcgtattacgttttttgaactagacaatagaccagatggatgacctcaaggtgttcaaggtaacacaggcgctactggtgccactggacctcaaggtgttcaaggtaacacaggcgctaccgaaataggaaataagaaattgccagatccaatgggaaaaatgaagcttgtgaaagtagacataagtgataaaaataaaaaccaaccggagatacgggaccaatcggagatacgggaccaacgggactaaccggagcaacaggaccaatcggagatacggccaaccggagatacgggaccaatcggagatacgggaccaacgggactaaccggagtaacaggaccaatcggagatacgggtgacatgtggagctgacgaatactaatagatcgaggacttaaccatataatatgaagcaatgttatctagttttgaacttaaccatataatatgtagcaaatgttatctagttttgaaggaatatgccttcatagtttggtgatgatggcagagcttaaccatataatatgtagcaaatgttatctagttttgaaggaatatgccttcaatagtttggtgatgatggcagaggaggattagctcagctgggagagcacctgccttacaagcagggggtcggcggttcgatcccgtcatcctccaccataacgggccaattactaatacgataatcaccgctaacgcgattaacataccgttttctgatgataattgtgagtcttctggtcccgtggtgtagtggttaacatgcctgcctgtcacgcaggagatcgccggttcgaccccggtcgggaccgccaagccgaaatgtcccgaagggcacacgggtttacgcagtaaactgtagtgtgctactgtttacatggaactacccccacttccgtgttcggtatgggaacgggtgtgacctctctgccatcattaccagactgtattcatttaagacaagaatcgtatatagcttccaatatttatctggaacatctgtggtatggcggggaagttttattaagacactgtttacttttgtgaaggaacagagaagccgggtgaaggaacagagaagccgggtgaaggaacagagaagccgggtgaaggaacagaaccagaagtgaagccagacccaaaaccagaagaaaaaccagaagtgaagccagacccaaaaccagaagaaaaactagaagaacagaagaaagcagaagaacagaagaaagtagaagaacagaagaaagccgaagaacagaagaaagtagaacctgagactaagccagaggtgaagccagaggaaaaacctgagactaagccagaggtgaagccagaggaaaaacttaagacactgtttactttttgtttaggatgaaagcattccgctggcagcttaagcaattgctgaatcgagactttttgatctttcggatgtaaccaaaattctgtagctatagtgccacgttgtaacataggtgcagcacaccataaattgcggaagtagttcagtggtagaatacaaccttgccaaggttggggtcgcgggttcgaatcccgtcttccgctgaggaaatgaagcggtagagcatactgcaagggcaggagcagcaacagtacaacgagatgtaaatgtacaaaacggttagtcccgttggtcccgtatctccgattggtcctgttgctccggttagtcccgttggtcccgtatctcctatttgctggaggtgtcgtatttccttgacctcctccgttatttgctggaggtgtcgtatttccttgacctccacctccagcaaataacggaggaggtcaaggaaatacgacacctccagcaaataacggaggaggtcaaggaacttaagttgatgggcatggggtaccgccagcatttcggaaaaaaaccacgctaaggattttttctataaaaaagaaaagagaaggaatagaagaagtaacggaagaagaaaaagcgaaagccaaggcaaaagcggcggcgttattttaactctgattttcttagcgtggtttttttccgaaatgctggcggtaccccatgcccatcaacttaaggttggtcccgtatctccgattggtcccgtatctccggttggtcctgttactccggttggtcccgttactccttgtcccattcagacccgctaattccttcccttgcttcgctccacggtttgcgatccctagcgcacccgcgcgggtgcgctaggtatcgcaaaccgtggagcgaagcaagggaaggaattagcgggtctgaatgggacaaaaggaacagaaaagccaggtgaaggaacagaaaaaccaggtgaaggaacagaaaaaccaggtgaaggaattccttcacctggtttttctgttccttcacctggtttttctgttccttcacctggtttttctgttccttcccgttccgcctcctgggtttcctccggttccgttgtctgttcccgttccgcctcctgggtttcctcctaatcaccgctaacgcgattaacataccgttttctgatgataattgtgagtcttcattttttaaccaattttttaagacactgttttctttttgtttaggatgaaagcatttcgctggcagcttaagcaattgctgttggtcctgttgctccggttagtcccgttggtcccgtatctcccgttggtcccgtatctccgattggttggtcctgttgctccggttagtcccgttggtcccgtatctcccgttggtcccgttactcctgttggaaaacaggtttaatttatgagagtggtgattatccgaatacatggaatcagtattttggtcgattgttgaagccagaggaaaaacctgagactaagccagaagtgaagccagaggaaaaacctgagactaagccacgggaccaacgggagatacgggaccaacgggactaaccggagcaacaggaccaatcggagatacggttggtcctgttactccggttagtcccgttggtcccgtatctcccgttggtcccgttactcctgttggcacaagatttagttgatacgtataaccaaagtcagaatgtatgcccacaagatttagttgatacgtaggtgatgtccatgatggccgtgttgaccttgatggtggtgatgtccatgatggccgtgttgaccttatacgtataatcaaagtcagaatgtatgcccacaagatttagttgatacgtataaccaaagtcagaatacgtataaccaaagtcagaatgtatgcccacaagatttagttgatacgtataatcaaagtcagaatacgtataaccaaagtcagaatgtatgcccacaagatttagttgatacgtataaccaaagtcagactcgattcagcaattgcttaagctgccagcggaatgctttcatccaaaacaaaaagaaaacagtgtaaacagtgtcttaaaaaaacttccccgccataccacagatgttccagataaatattggaagctatgctactggtgccactggacctcaaggtgttcaaggtaacacaggcgctaccggcgctactggtgcagtaacaggaccaaccggagatacgggaccaatcggagatacgggaccaacgggactaaccggagcctagcgcccccgccacggcttcgctcactttagaagctaaattatattggtcataataccaaacctagcgcacccgccacggcttcgctcactttagaagctaaattatattggtcataataccaaacaattggtagagcaactgacttgtaatcagtaggttgggggttcaagtcctctagtcggcaccagcgctagggatcgcaaaccgtggagcgaagcaagggaaggaattagcggttctgaatgggacaaccaaaaccagaagaaaaaccagaagtgaagccagacccaaaaccagaagaaaaaccagaagtgatttatatatgagagatagttctctcaaaactgaacaaaacgaaacacggaaacttatattgatatgtaggaaatatagtgtcaccacaagtgaagaaagagaatgtaggaaatatagtgtcaccacgaagaaaaaccagaagtgaagccagacccaaaaccagaagaaaaaccagaagtgaagccagaaagggacagaagaagtaacggaagaagaaaaagcgaaagccaaggcaaaagcggcggcgttagcattgtagcgaattaaatagatttctaagtcttgactatcttcgatataccctcttaattgttgcttaagctgccagcggaatgctttcatccaaaacaaaaagaaaacagtgtttaaaaaaatgcatttgcttgtccgatggggtgtattttagagtatgcgacaacggatcgtgaaggatatcccaggtgaaggaacagaaaaaccaggtgaaggaacagaaaaaccaggtgaaggaacagaaaatcagaaccgctaattccttcccttgcttcgctccacggtttgcgatccctagcgcacccgcacttgaacccccaacctactgattacaagtcagttgctctaccaattgagctaagtcggctgcgggtgcgctaggtatcgcaaaccgtggagcgaagcaagggaaggaattagcggttctgaccttgaggtccagtggcaccagtagcgcctgtgttaccttgaacaccttgaggtccagtagctgggtttcctccggttccgttgtctgttcccgttccgcctcctgggtttcctccggttcattggagcggaagacgggattcgaacccgcgaccccaaccttggcaaggttgtattctacgtatttccttgacctcctccgttatttgctggaggtgtcgtatttccttgacctcctcccttaagctgccagcggaatgctttcatcctaaacaaaaagtaaacagtgtcttaataaaaaaccttccccgccataccacagatgttccagataaatattggaagctatatacgtactaaaacttccccgccataccacagatgttccagataaatattggaagctatatacgtactacaaagtacgtatatagcttccaatatttatctggaacatctgtggtatggcggggaagttatacgtatcaactaaatcttgtgggcatacattctgactttggttatacgtatcaacgagatgtaaatgtacaaaacaatgtaagaggaagtgaagcggtaaataacgatgtaaaaaaaaccttccccgccataccacagatgttccagataaatattggaagctatatacgcgtatatagcttccaatatttatctggaacatctgtggtatggcggggaagtttttttgagagcgcctgccttgcacgcaggaggtcagcggttcgatcccgctaggctccacttaaggctcggtagctcagtcggtagagcagaggactgaaaatcctcgtgtcggcggttaccgctgacctcctgcgtgcaaggcaggcgctctcccagctgagctaaggccccaaagtagagcacctggtttgggaccagggggtcgcaggttcaaatcctgtcttcccgatactttacggttagcttcttcctgagctttacggttagcttcttcctgagctttacggtcgccgcctgtcggttttcaagaccgatcccttcagccgaacttgggtatacctccgacgccggtagcgcctgtgttaccttgaacaccttgaggtccagtggcaccagtagcgcaaacactgttttctttttgttttggatgaaagcattccgctggcagcttaagcaattatatagcttccaatatttatctggaacatctgtggtatggcggggaagtttttttaagagagcgcctgccttgcacgcaggaggtcagcggttcgatcccgctaggctccaccaatatagcttccaatatttatctggaacatctgtggtatggcggggaaggttttttaataaaaaaaacttccccgccataccacagatgttccagataaatattggaagctatatacacctccagcaaataacggaggaggtcaaggaaatacgacacctccagcaaataagtggagcctagcgggatcgaaccgctgacctcctgcgtgcaaggcaggcgctctcctggggccttagctcagctgggagagcgcctgccttgcacgcaggaggtcagcggttccccccccccccccccccccccccccccccccccccccccccccccccccccccccttatatggtggaggatgacgggatcgaaccgccgaccccctgcttgtaaggcaggtactgtaaatccgctccttcgggttcggcagttcgaatctgcccccctccaccatttctggtgccgactagaggacttgaacccccaacctactgattacaagtcagttgctctaaaataaaaattgacgtttcacgttgtttgtttcgttcagttttcaaagaactaattatcaggcttcatgtcttccttttccattggcttatcaggagtcattggcttatcaaaaaaaaaaaaaaaaaaaaaaaaaaaaaaaaaaaaaaaaaaaaaaaaaaaaaaaa
